United States Patent Application Publication US 2022/0211063 A1 - sequence listing, part 33

SEQ ID NO: 103 - DNA, 8605626 bp, Penicillium roqueforti (residues 6,884,505-8,605,626 of 8,605,626)
  misc_feature (89143)..(89590): n is a, c, g, or t
  misc_feature (91422)..(91652): n is a, c, g, or t
  misc_feature (329881)..(330017): n is a, c, g, or t
  misc_feature (430768)..(431099): n is a, c, g, or t
  misc_feature (461651)..(461667): n is a, c, g, or t
  misc_feature (496410)..(496589): n is a, c, g, or t
  misc_feature (532013)..(532107): n is a, c, g, or t
  misc_feature (539763)..(539898): n is a, c, g, or t
  misc_feature (569547)..(569751): n is a, c, g, or t
  misc_feature (649064)..(649200): n is a, c, g, or t
  misc_feature (691125)..(691187): n is a, c, g, or t
  misc_feature (866510)..(866674): n is a, c, g, or t
  misc_feature (1032466)..(1091865): n is a, c, g, or t
  misc_feature (1092552)..(1092763): n is a, c, g, or t
  misc_feature (1210196)..(1210408): n is a, c, g, or t
  misc_feature (1240554)..(1246826): n is a, c, g, or t
  misc_feature (1247753)..(1253685): n is a, c, g, or t
  misc_feature (1258304)..(1372303): n is a, c, g, or t
  misc_feature (1374137)..(1374545): n is a, c, g, or t
  misc_feature (1457544)..(1457830): n is a, c, g, or t
  misc_feature (1505357)..(1505529): n is a, c, g, or t
  misc_feature (1513228)..(1513390): n is a, c, g, or t
  misc_feature (1624050)..(1624251): n is a, c, g, or t
  misc_feature (1669160)..(1669365): n is a, c, g, or t
  misc_feature (1761228)..(1761454): n is a, c, g, or t
  misc_feature (1817775)..(1926074): n is a, c, g, or t
  misc_feature (1933175)..(1933425): n is a, c, g, or t
  misc_feature (1963987)..(1964364): n is a, c, g, or t
  misc_feature (2150522)..(2150620): n is a, c, g, or t
  misc_feature (2196752)..(2196960): n is a, c, g, or t
  misc_feature (2250746)..(2250802): n is a, c, g, or t
  misc_feature (2391558)..(2391849): n is a, c, g, or t
  misc_feature (2493588)..(2493819): n is a, c, g, or t
  misc_feature (2532194)..(2532471): n is a, c, g, or t
  misc_feature (2536340)..(2536581): n is a, c, g, or t
  misc_feature (2786627)..(2786883): n is a, c, g, or t
  misc_feature (2859585)..(2859876): n is a, c, g, or t
  misc_feature (2873996)..(2875100): n is a, c, g, or t
  misc_feature (2881617)..(2881922): n is a, c, g, or t
  misc_feature (2897171)..(2897349): n is a, c, g, or t
  misc_feature (3050746)..(3051470): n is a, c, g, or t
  misc_feature (3057261)..(3057512): n is a, c, g, or t
  misc_feature (3069611)..(3069986): n is a, c, g, or t
  misc_feature (3075842)..(3076216): n is a, c, g, or t
  misc_feature (3304906)..(3305003): n is a, c, g, or t
  misc_feature (3318192)..(3318516): n is a, c, g, or t
  misc_feature (3502503)..(3502617): n is a, c, g, or t
  misc_feature (3537788)..(3538371): n is a, c, g, or t
  misc_feature (3783217)..(3783431): n is a, c, g, or t
  misc_feature (3992070)..(3992188): n is a, c, g, or t
  misc_feature (4004970)..(4005233): n is a, c, g, or t
  misc_feature (4027160)..(4027360): n is a, c, g, or t
  misc_feature (4058285)..(4058431): n is a, c, g, or t
  misc_feature (4267035)..(4267072): n is a, c, g, or t
  misc_feature (4352538)..(4353000): n is a, c, g, or t
  misc_feature (4361537)..(4361689): n is a, c, g, or t
  misc_feature (4393455)..(4393688): n is a, c, g, or t
  misc_feature (4451187)..(4451324): n is a, c, g, or t
  misc_feature (4461216)..(4461462): n is a, c, g, or t
  misc_feature (4480922)..(4481040): n is a, c, g, or t
  misc_feature (4533587)..(4533724): n is a, c, g, or t
  misc_feature (4589847)..(4590075): n is a, c, g, or t
  misc_feature (4668669)..(4669001): n is a, c, g, or t
  misc_feature (4736843)..(4736937): n is a, c, g, or t
  misc_feature (4766465)..(4766662): n is a, c, g, or t
  misc_feature (4834245)..(4834552): n is a, c, g, or t
  misc_feature (4927235)..(4927808): n is a, c, g, or t
  misc_feature (4944816)..(4944966): n is a, c, g, or t
  misc_feature (5082236)..(5082384): n is a, c, g, or t
  misc_feature (5112277)..(5112998): n is a, c, g, or t
  misc_feature (5314355)..(5314548): n is a, c, g, or t
  misc_feature (5372288)..(5372715): n is a, c, g, or t
  misc_feature (5458669)..(5458780): n is a, c, g, or t
  misc_feature (5479980)..(5480153): n is a, c, g, or t
  misc_feature (5535122)..(5535136): n is a, c, g, or t
  misc_feature (5567270)..(5567409): n is a, c, g, or t
  misc_feature (5598490)..(5598703): n is a, c, g, or t
  misc_feature (5726526)..(5726604): n is a, c, g, or t
  misc_feature (5743037)..(5743505): n is a, c, g, or t
  misc_feature (5807199)..(5807285): n is a, c, g, or t
  misc_feature (5919535)..(5920213): n is a, c, g, or t
  misc_feature (5921527)..(5921833): n is a, c, g, or t
  misc_feature (5942409)..(5942688): n is a, c, g, or t
  misc_feature (6010874)..(6011169): n is a, c, g, or t
  misc_feature (6324695)..(6325013): n is a, c, g, or t
  misc_feature (6397105)..(6397216): n is a, c, g, or t
  misc_feature (6604362)..(6604532): n is a, c, g, or t
  misc_feature (6843301)..(6849052): n is a, c, g, or t
  misc_feature (6859407)..(6860047): n is a, c, g, or t
  misc_feature (6914764)..(6915551): n is a, c, g, or t
  misc_feature (6918855)..(6923725): n is a, c, g, or t
  misc_feature (6950174)..(6950310): n is a, c, g, or t
  misc_feature (7009778)..(7010015): n is a, c, g, or t
  misc_feature (7088368)..(7088591): n is a, c, g, or t
  misc_feature (7280661)..(7280840): n is a, c, g, or t
  misc_feature (7435020)..(7435145): n is a, c, g, or t
  misc_feature (7579716)..(7580036): n is a, c, g, or t
  misc_feature (7597713)..(7597862): n is a, c, g, or t
  misc_feature (7638927)..(7639043): n is a, c, g, or t
  misc_feature (7648137)..(7648344): n is a, c, g, or t
  misc_feature (8007031)..(8007217): n is a, c, g, or t
  misc_feature (8052759)..(8053224): n is a, c, g, or t
  misc_feature (8128886)..(8129301): n is a, c, g, or t
  misc_feature (8133596)..(8133784): n is a, c, g, or t
  misc_feature (8187871)..(8188020): n is a, c, g, or t
  misc_feature (8239554)..(8240025): n is a, c, g, or t
  misc_feature (8245462)..(8245573): n is a, c, g, or t
  misc_feature (8304738)..(8305328): n is a, c, g, or t
  misc_feature (8313694)..(8317811): n is a, c, g, or t
  misc_feature (8345163)..(8345264): n is a, c, g, or t
  misc_feature (8407543)..(8407749): n is a, c, g, or t
  misc_feature (8424434)..(8424559): n is a, c, g, or t
  misc_feature (8481328)..(8481551): n is a, c, g, or t
  misc_feature (8596939)..(8597185): n is a, c, g, or t
atgaaaaggaaggtgaccttctcggccggactacactgatgcgagtaaacgagcaggatgagatgagcttgtctattcaaaaggactcagattcttgggaagatgtggagatggagtcactcgcgttgcagaaagctgctttgttttttgaaccttgaaattgttgaaatatgtactgtataggtaatatttctattcatcgcagagcgcttttaggaatacgttgagcttgcgtttcatgaaaatattttaaattcagactttgtatcagactgggtatttttttttctgaaacaaagtagggtttttacttgaagcagtgtggctcatctcatacagacacacacatacacacacacacacacaattcattacgcccggaggtatcaagcctagagggcacctatacgctatttgatctttccattgtatacattttgtcatagcctcattttcgagaggaaaagctgaaccagctgcaaaaaacccctccagcccatacggtatgtcttaacgatttctcttcttgttgttgttgtcatatcatctcctccaaaagcaataacccatccctctgtgacaccggaccccctacgtgtccattctcgatgtagttttcgtgaacctcttccctgagtagcggtttaccgagagtacttctcatattaacgcccgaagtagctgactgcctcgctggcagcaacaccagatagcagacgaaggactgacgaatcgacatgcgatcgaaccggtagggcaggtgagttattgtgagcaaaacccggtgagggtaggttgaaaatgtgtaggcaggtcggttgttcgaaggctcgtcggcattgcgacgttgttgacgtgtccttttgaaggcttcccgccgcgtcgtcacaaccaataaaggagtttccaccggagtttcgatttgaaaagttctcagtttcggtcagacattgcagtccaacttactgacatccctccccacggagaaggtgactttccatgagggactcatctcatacagtaaaattcgaaatcagctttaccaccgaactttttcactctctttcccagcgccccacccagattgcgctaaactgtatttggccacggaaggtcccccagactaatggcatatgtaccttttgccgatcgtgaaaaataccgtaagcccgattactggtaccagacaccctgcgttcccaatatttctctcccgggcctgagtggcttttcgattgctctaggcttctaatatcaaacttttgaggcttattttccagtgcaatgattcactacttcgcgatgctaattctgtgatgtatcccaagcagatagctcccttacatattcactgtggttgagccatttgtgagccctggaccctggtcaagcttttactcaggttagacatcttttcattttatcacctaacacacaagaggtcttgatgatggcctagcattgtcattattagactaatggtgtgtgttggacaagtctatgacaaaaattgccacccaactcaaaatgtaaagacccgactcttgtgtgtatttctcggcaataaataccatgacattgctgctgatcggcagcttgctgagcggagcagatctatcataaattcttatttccgtagtaaagttcttccgcccggctggcaacaattcagctgtctctttcaaacccctaggaggtctgcctttgcatccatcatgagagttcaggcgaagtcctctttgtccttcatctttgcgactagagctcactttacttgaaactacgtttctggaaaatatgtcatcaaaacttccatcaacgtgtatgtgctgtgtaaactgatcaccacccccttgaacctccagcgcagcgaattaataaagccagcaaacgtggcaagccaggctccacaggattacgctcctgctcagcattttgccctcatctatatggatcaatatgggacacttcactatgaggcgtccccttcaatcgtccattatcgcgacactatcctttcccctcaagtcaccgcggaattcctgaaagcggtggcgaactccactgaagttggcctgcgaaggtcctccctggaattcgcttccacccagctatttcctgatcacctcgggaactatgactctcacgattctcggtttccgaaaggaatacaggccgagggacacgatgtgcctacaacatatggatatcattcacagcctcacctatggccaggccatgatatagctacccccgccatcttgaaagataaagtgcttcacaagaagagatcttgtttgcagaagcacggcctggagctccaagaagcaatgttatccatcaaagatacgaaatttctccgccgatactacgaaaaggtcttccacaatatacagcaaaccaattgccgagtcctggcaaaagcctatgtgaaatgtgttgagccccacaagcaagtcaattacccttataatgggcggaagaccgtggcgggggaaatacgacaattaagttccgagcagagtaagccaccatggtggcctcctcaagtgcgccatcgggaacccgatcatctactcaaagcaggtaacaagacactttactgcgcatgatacccactaagctcatcatctcactagaacgcatcgcgcttcttctccatattctttgtgatttgcgctgcagtcacggcgtcacatcacaaaaactgaaagatgcagagcaatctgttcggtcgcatattatcccggttgaacgtttagaactcctagatgagttgtatcgtgttagaggagaagaggaaaagcttttgatggggcttcttggtaagggcttgcaaccacccattcttcacaagctaatgaagtacatctagaaaaagacgcagctgttcttatctcgcggatcaatttacccgcttccaataaaatacccagcaagcaaacccagccggacagttgggtctctctgaagtacaaagagggtgcagcaacatacgaatcgtcctctcacaaacaagatttgtacaatgtgcctatatacccgcagcgtaacttcacaggatacaccactcgccaagaagacatgatggattcttttccggtcccggcaatgtcatccactccacttggaaaaaagcgcccgatgatcgacgagacatatccttctacggcaattttcagtcccacacatttggtatcctcgcagtgtgtcaccagccattctttgtttgtgaatcttccagtaatggaggatgtggggcctaggctacaaaatggtcccggattggttcatgctgaaatggcactatttgcagatcgcactcaaatttgcacaatttagagatatttaccatcacttactctcactgactctagcctgtcttgtttactctagtcgccaaaaaagataaacaagacattttccccctggaatagggtctggttggcacgccatatagcaaaggtataagcttttcacctacatgcatccattaacatatttttttcaccaatgccaatcaggtttaggctgagagagttcttgaaagcgtggtctctaagtgaaagcctgtcacaactcagcttttccatgtgtatcttccaggtcacggggcataagagtcaacgagatagacacttttgaaaaaaacactctatgagattgtagagagatcctcagtcaagaaatatgctaccgcatactgtgatagatcgtctatgcattgtgattgagctaacttgcggcgtaaaaactatccagtgctgcacgagcagaagtcacacttgctttgagactagtgagcgcgcaatatgtatgaaggaaagcagcttcttctttacaatgccccgctctatctccgtcgtccatctttgtgctcgctattcgaatgttttcacagctctcattgatcctgtacatccctaacatctttgatttgcgtcgaagatcgtcacagaatgatcgcaacagaagtgtgtcatcatttaagctgatagatgttagcatgctgcaaatttaacgtaagtttgaaggcttacaaggctttctccatttcctgagtcgcagttattgccactgcaatatgtgcatatagtgttgtagagctggttaaacgattttcctcatgatccatctctagcagttgcgagaaaattgccgcgtcaaaattccgcttaaggttgctttcgaattgctcatttgtcatattttaaaatgtaatcaaagaagacctgcatgctgtagtagtcgcgctaactgaaaaataaacgcctggtgggaattcttatatgcagtgagaaatgagtttgtatttgccgctgaagaggcccagagcaatcgaaaagccaccccaggcggcccggatgattgggaacacggggtgtctggtaccagtaatcgggcttacggtatttttcacgatcggcaaaaggtacatatgctgtcggaacgtggtcgttacagtacggactagtacgggcatagccaattgagtacttgagagtgtgttttctatatactatagaaagtgcagaataaataggggatgagcttagtaaggtcgttgagagccttacgatcgtcaggcagagggggtgctgaatattcctcgggcgcactagtaaaatggcgaccctcttttgttgacatatgccattagtcagggaggccttccgtggccaaatacagtttagcgcaatctgggtggggcgctgggaaagagagtgaaagagtttggtggtcaaactgattgaatttttctgtcgatgattctcagtgagccttacccaagttcgagacctattctctcccatcaatcaagccgccagggccaaaatttcaatgcaaaattaagagtagattattctgtggtcctgcaagacacgttacatataaatgccaattacctgtcaatcaaaactgttaatttgatttatgcaagaatgagagattgatgcatttaaccatcatcaaatgaggacctatattaataccattccaaaccttactctttgtaagaataaaaagtacatgcagagacgatggcaagtcgcgctagcccaactaagctgccggtggaacaagttgctgcaacaagcggatgctaaagactgtcaatgtttgatttaatcagaaaatattgcttcagcttacctgtgtcagttccattacagacctagctgacgttgtcgatgatagaaaatcaacggcattcgaatcgatgggccaccgagctggatcgtctatccccacattctctttgacatatttctgcatcagctccattgtcagagatcccaagcctttcaaggacaaagactgagattgttccggcgtgtagggcacagtgagttctaaactagctatcacgacaatcagtctttcaccggcgattttgaagtgctaagtacaataccaattttcaccactccgtctaaactcattagagtagtggagcactttaaagacgaatgttcatagccgcattcaatcagataagacaatccgtccatgacctttttcatatgagcaaagtcgtctttggaaaacggcggtaacaagaacttacttgtttgacaatggaagccagctggacctcactgggataggcatcgctggcgaccaggtgctctaaactgatcggtaggtcatcaacaatgaagtggttcactccattgtccttgaaacattcactggcagaaattatgttgaagtggtcgaagcgcgtatatttgtggagtgactcctctccatcggttcttgacgagcttcgtatggctactactttagaaccccggcgacgatgttcgcaaatcgatactgtaccggcaagatcgcatgtaaatatgggcttataagtctcccacggggaacaagttcgtataagtggagtctgcgccaaccctccagtatcgacaatggtggggagctccagtgtttttggcgaacctctcagaatcttgcgagagcgatcttgctgagccgcagggcccttttggtatttgatagagctttgggtatggcctggctgatcagtgaaattgtgaggctgcgtttctgctgccgtgaccgacgaagagaaatgcgcctgagcttgcaacatgtcaaaccgagtagcccgtttgtcttggtctcttttcatgtttgaatatagactctagaagactttcagaggaaaagaaaccaggtaccatggggacagcggtagcagtgtttttgtagggcacattcgagctgccatccacagcgagactatccgcagcgagccttgccatctgccaatggccattcaacgacctaagagcttaaatgcgctctgatggccgcttctcaaaccacattttgaggaaatcttatttggggattccgagatggaacaatctatgttcacagatgcggaagcacaactgacaactgagcggcgcctgaagtaccaaggaactgccaagatagatctgagccagattacatgtcacccatgcgtggctcgacaactggaccaaaagaatgttgagagactatgcgaggtatttcggaaggatggctgtaatcgacttgatgtgcaacatcatgttacagctgttgtaacccgccgacacttgaagcacgcccggcgggaggcacagataaccgcggaggaattgctgactaatcgacctgataaatacccgttcctttctttcccctccagccaaatccagtgtctacatggtcaacaccgcctgcatgctgcaacagaagtccttgctcctagtgagcgatggtggacggtggacctctatctagatggtgagtttcgttttattggctcaacttctattttacagccttcatttttaattgcctcgttcggtctgacatttatgtagacattagccatgaattacgaaataccctagtcgatgaatatgcaaacgagaagacacccactgatggagacatataccgcaaaatccgacaataccaaagcgagcataatgcagcgttccagaagcggtggtggacgcgtctttcggaaaataaagctaagcgtttgcgacaactgatgtctcctgacaacgtcgacatttgtgccgcctttgatgccctacttcccattccaggtctgtggaatggcctgagtatcggctctctcaatcgtgtactagcattgaagtgcgatgaagttagttatcatcgctttccccggcttccactcatttttcgctaatgacgaaggaaattatccactatttacaacatgtggaaagattctggtcgactctaatggatggcgatcgacatcagatggccaaaatcgacattcataccgtggaaaagcttcaactgagagccccagcggcatgttctgcggatgcgagagaagtcaaaggctatatactcggcggtgaggtcttctcccagtttgaggagactgaacaacctagaatatgggatcgaatgtccagttatgacgggatcattccttcaattcacacctttttccgcgatactacttatctcgaggcgtgcgcaaccggcgtgcggcagtttgctgttctgagcaagagccagccaacagtgcgagccgccttgaagcatgcctataagcctgacacgaccaggggggcatgtctcgtgcagacatcagatgcgagctttcggaatcacacaggcccaagcacggattcttttgaactcgcctatcgacaaatctggttatttgctatgcgccattacccggaaatggccaaagatgctaccagcaagaaagttgtcgccaagaccatccgcggaagagcggacgaagtagtgctccacaatatggctacactcgcacagaaattgggatttgactctttgccggtcactgaaatgttgaaccgttctcccgaccgaagaattgctcgcgaagctctactcaaggcccgaaaaccgggtagctaccgatatgaccccgccacattcgattcactcattgaccgattagtggagtgttttggtaccgcggtcgctcacgaggctttaccatcgccagatttcgttcttgaaaggacaccaacgctttcacgtcgttgtggtcccccactcgagcatgtgcagccgatagatcgacctcaccttttcctaggcaaagtgcattccaaagaagcgacagggccgcagactatctcctccttttttgtgagacaatgcgtgtattttgctttctttgacaagcctttgacatggacacaaagtcaagaccatgatcaagcttcgcctgagctgctgcaaacggacgtttctagatcccctctgttcgtaccagttgatgacttgccaagtaacccacgagtggtcccagctacgggatcagcttcacaaagacaatcacgccgagagcaacgccaagaacgacgccgtcgaagacaggcaactggaaaccggtcacaccgagaccggcgacaggaaattgttgaagaaatacatcctgccgttccggccgatccagtcgactccatcactgctgatgatgatatgggtatgaatgacgtcgcccatgttgttgctggtggtgcagacatttccatggcaggatcttccagtgagagtcccatcggcgggagtgatcatttagcgatacagaacgagttattccgcgacaccagaagagatgttgaggagaacccagagcttttgccaaatgtcgagcaagacgagcaagcgcttgctcaagtcagtgacacaaggcgcaacttgggagacattgtacacgaaccatcaactgacagtccaaatggccatgatactgcagagcgacaatcggaagtgaacgaggataccgcctcgcaatattctcaggactcttcacgaagcggcgagaacgactcaatggaatatgtggagtccgtcgtgcctgctgagatgcaagaccggttgacaagaggagtgtcttctgatgcagatctacaactcacgtcgtgccctgttgaggcggatagcgaaagcctgaatcaacggaccgaggaaagagaggttgcgcaagatgcagtacaacaagcccttcggatgcttgagcaggaagcagagacacgggcacatactagtatagaacggtcagaagagcaatttgccacgtcgaccgatgagccaactgcttcattagagcttcccagcccaggtgtgggaccggctgtgaacgcattggctgaatctcgcatatcgaatgaacattcgccagccacaactcagaatcctgacccgattgttcggcaaggtcgagtgccacgaaacgcccgagcagcaaagaccatcactcaaattgatttgactgggctggatgcagcaattattgtgggagaggatggacccgaccagcaagagcaggctgagtcaccaatcatcggtcgggctgcgatttcaacccctcttggtcaccaggaattgtcggagcatgagcagggcacagacaatatgggacctcgagagtttctgagcgatttgcctgatccttcggcctcaaatccgatcataggtgaatctactggcccgcctcgacccgcagcgcttcagatctcagcaggggccacgggagagggcgggcccagccaacgagaacaggcagatgtccaaataacccatcatgatatggcatcaccagtctctaagcctccggaacccaaagagcatgttcgacagacgaacaaaaagaagctacgcgaaaataaggatgactcgcaagaggctcccgcctcaggccaaaacataagtgagttcacagttccacctctgccggaagcgcttcgcccacgtcggaaccctccacccaacgcaatcacgattactttcaaaatttatgagaatggaggatggcatgtgacggaccaagtgccggtcagcccgaaggacccatcggaagcacatcgtatagcccacaagtatgcccgcaaggacaacaaacatgcgcgcttctacaacaagaacttacgactagtcagcgctgctcaatgtgtccgggccgcgatggatgatggatcgaataccgtcctcatgagcctacaacaggatctcgtagtgacacgagccaaagtggctgcggtggccgagatgatggaagcggacgctcagagaagggcagcaactgatgctgatgatataataatgtagtcaggtttcgaactagtcttgagtcaccaggcgtcttaagctctgagacttatggcttagcaggtcgtgaaattgtaggggatataagttggcattctaatggcctggtaggtcttgagaccgcggtcttgggacctgctgggtctctggctctgtgtctaccgccctcgggtcagtgtcaccgagccctagttcgtagtcttatatgagcagatttcagttttaggttacatgtcatcagctttcaaatatgtttcttataattgcccgggatttaagcctatagtcccatcgccttggtggccttctgttaatggacacgtgctgaacttgggcttcgatcctctcgggctataggagtacttctgcagaaccttcatagtcccaggacccctagccacgcagttaccattcttttacggacctagatgctcgtcctatatgtgaacttattttcttgcacttggtggaccccaatgagcattaaaatcatatacgaaccaaagacaaagatcataggaatcactgtcgtgtcgccataaccagagactccgtcacagttgagtgaaaatcaccagggatatgcctgtcaccaactgcatccctcacgtcgagcacatcatatccaagctcagcagccgctcgggtagtggtggagacacacatgcgccatatagccaaccaacacgactttctttcctacatcgcctagaccttgcagataggcatgcagatcggtctttgcagacgcactaggaaagtctttggtgatttacacaatgtaacactcctgtttcttcacattcgtgaagactttgccactctagcatgaaagaaaatagtaagggaatatgttcgattgttgcccttatggcctgtgatctgtggcttaaaagccgcatcttgtaagatagtttctgctatatccaatcaaagccaactcgtgcgtcatgtagaagagcagatgcttgagatatccagtttttcgcatctccattatcccgtccgactgcggatgaatcagacttgtttaacacctcggactcaccgcccaatggagcattccacagctcatcactgtctggcatgcaaaaggacaagtcggccagggtcaaaagattggttgtgccactattggaacattctccgctcaagtcaaaggaagcgggagtggacaatcggcacaccttatagagggctagtccaaatctcttgatctcttcaacgctcacatatacaagcgcgagtggtgcatcggcatcgtgttgcagaagcatgttgggatagtagaaaataccccaccgtcgacagctttgaacaagcgcagccaagaggtcgtatttgtcgtctggtaatcggcatcgcatgctcaaatctgtactagcattctctcttgcaatgaaaagagaaaggatgatattcaagagcacactttgaaatgatgttatgggccacgtggtatttgtgtgttggcgtggactcgagttggagatgcaccattggtcctagagcacaagaatgagattaacacacaattctatatacagttaatattataatgcttcttcttctcaccatttgagcgttaaatgcggaacatagtctattatgtagacgtattgatgcgtctcgtgcctcctgagtccctttaacccaaagtccgattgcgacaacggattgaacaagtacacaaggttccttagcaaagtcaaatgtacttcgatggagaaacggccaccttgagtggaaagtatcaaagtaaatatcaatatagtcatgagcaatccaccggggagcgtcagaaacggaatcattaatcgtggaaacaggcggcaaagggcaaagatcatcgatcgaaaattgttgttcgcctacggtttcacccccactaggcacacagaagacgccgcgatgttgacaggcattgcatggtaatatgccatcacaacgtactttccgcacatgacatgcaatacatgccctaaatttccgagacggcggcggttctctctgcggatggtaagtccggatatggcgtcgcaataggtcactgattactctctgagttgaaagtcttcccacgggatcggagaaactactcacttcctggtcaggacgctctcacaataaggacagggaagattgatttccttatcatgatgattacgatgtcgattcaggtgctctttacgccgatatttggcgttgcaatctggaaagtcacattggaaccacaaggggacagtatcggcatgaggcggcattgtgcagaatttttgcaaacctctggattccacaacattgtgaaatggcaaaaatggaggcaaaaagggagaagagaaggtaatgactggagctccggtggggccccgaggaaagtcaccaatgaagttacaccggtcatcccgcttgatgagtaactccacaggtggcgctaactatatacatatccgtggataaaccggcaagtgggataggccgaccatccaagtgtatatctataaatggcaaaccttcgaaatggtgttactccttttactgcctccactatcttggaaagatctcttggcagttcagtggatctcaattggagtgcaccacaatgcccaacctctatcaccctgaaacattgcgcaacgactctgaacaaaccgacagcgtcgatgtctgcaccgaaacctacttcgcctcacatcttgagccagcaatttccaaactggccagcatacatgcacctccggaattcgaagtttactgggactctgacgaccccgaaaatccccacatgtggccgctttggtacaaaggcctcactgtcgctgctatgagtcttggtgctacagttgtcagtctctccagcacactgtatacatctggaattccaggactacaagatgattttcatgtttcgaagatcgtggctctccttggtgtcacgacttaccttcttggaatggggataggcagcatcatttttgctccactcagcgagcttgtgggacggcggccaatctatattgtctcaatgataatatttttgtttttattgttaccgagtgctttagctcaaagcattgcttcaatcctcgtgagcagattctttggaggattctttggaagtgcattgatgtcgaactcgcccgcatctgtgaatgatatcgtctcggataagcaccgtgctttagcattcggcttctggtctattggccccaccaacggccctgtttatggcccaatcataggaggatttgtgttccaatatcttggctggaggtggacaaattggattgtcctcatcattgggggtgtggtcctggtcctgatatcctctgtcaaagaaacttacgcccccgtgatcttgaaaaagcgcgccgcgattaaaagaaaggagacacaggacccaaaatggtggacacgctatgacgatggtgtcggctttacatcctcactgatgatcaatctcaagagacctttcgtgatgctcctaacagagccgatatggtaaactatctccctcccatgctacaaagccaatgttaacattctcgtagtatattttgggatggctacgttgcgattgtttatggcatcctttacctatgtttcgtcgcgtatccaatcgctttccaacaagaacgtgggtggtcgccaggcatcggtggtctttcattcgtcggtataggcgtgggtgtcttgatcgccattgcatgcgaacccttgtttcgtaaagtgatcaatcttcatcgcaaggatccagaaaccggcatggtacaaccagaggctatggtcagtgtcgtcttttttggtgctactcttttagccattggccagttgtggttttcctggacttgtactccaaacgttcactggatcatccccatcctagccggtgttccctttggaattggtaatgcatgcgtcttcatttacgcctcaaactacattgcccggtcttatggcatttacgccgcatctgcgcttgcaggaaatatgctcactcgcagtgtcatgggagcattcctcccacttgcggggccatcaatgtataagactctgggcttgaattgggcaagtacaatcctgggaatcgttgagacagtatgcatcttgattcctgtcgttttctacttttacggacacagaattcgaaaggccagtcgctttatcaaagaggtagaaaagctgcaggcagcttgaaaaaacttattagcaaaatgttatatgtgctttatatttgttcgaagtgaaaattgatgtctacgataagtcattttataacaacgttccaaaattcatctatctcctaaacggtggaccgtgacaatcctttaagatacggtgtcttgactaaggaccaagctacagttgggtataaagccaagagaggttacctttttcttttcgtggtttcaacgggatttccagaataaaatacatttagtcggagtaagccttcgagcgcagcagatagcagttgtgttgttgtgaaggtcatatactcagcaaacattccaacccaaaacgtaaattacacactttacggaatatttgtcgttgttccatctagtgattttgaattatccccaccatattaaaccgtaaacagtcagattctccgccaagccttttgtgtgcaaccttgaaagtggctacgaagtggcaattgcttactccgtaaagagtagagaagaattactcaaattgattcacaaccactgtgctgaataaacccgtggacatcccgcagagatattataaatttctctccattttcgtggcaaaatggaactttatctctacgggcgggatgagccgaacttacatcatcagtaggatgaaacagaatttctaatattttcagaaaagcaaagtatttaaacctcggtttcccatgaacagagggtctccatatttcattccattgaatcacatccacagtatcaaaagttcacatccccgactttcgctcttaccgcagccatggcagcaacatccaaaccaacccttacaatcacacacatcaccacagcaactgccattctcaacattgatggagtcaactttctgacagatcccttcttcggagccatcgaagggacagagtatgattcgaccgcggtctgggagcaaatggacctgaaaccgtacggtctcgacagcatccccccaccaccgcaccttgtcaacaagcaaggaccagcgcttcagctcaatgaactgccgcctatcgatgctgtccttcttagccatgaggatcaccttgacaatttggacccagaaggccgtaagctgctggatggtcgaaaggtgtttaccaccgtggacggtgcctccaacctgcgcccacgcccaggagtcattggccttcgcccctgggagactgtgacttcttgtatcggagggaaaacgtaccgaatcactggtaccccttgcaagcacttcccagttggagaagttacgggcttcgtcctagagaccgattccttcggtattgatccatctggcaagcctaatgcaatctacttctctggagataccgtctatattgatgaactgcaagagattggaaagagatggcacattactgcatgcattttcaacttgggcaatgccacctttgaattcccaagtggccctattcagattacaatggacggtaaacaagctgttcggcttgcccgtgatattggcgccgatgtcatggtcccaattcatttcgaatcgtgggatcactttaaggagggcggagcagagttgctggaggttttcacccaagagggatttttagacaaggtgtgctggacagttcctggcgttcccaaggttgttttttgattgtgaatcaatctatcaatattgcggccctatggccctctttctgcttttatgcttttcttttcttttcttttctttttaccgtaagttgatttagacaaatttctcagacccaaagctaagatattttccaaaaaggaacatatcacgaaacagaaaaatagtccctcggtagaaatagaaaatctctttctattctcaccatttgatcttcaatgccatacaaagcagggccttattcaatggctgaaatgccgcgccactcctcgtttaatttttatcctttgtttgaggttttgaaatgtaacatgacgaagtccaaatgacccagggccctatacattctctgcagtgaagaatgttgtcggggctgaatgaaacctcacgtttcacatgggagtttcgccaacagatatgtcaaagtcatatagatgcggtaaactatccattgcggacagaatctctctccatgttccagtctcgagcttcacgtgccttaactcgatgtacttcatcgattcactgcattgctctataatattgacgagattttgagatgaaattttcacttcgcgcagagacaaaaactgcaggcgaacagttgagccgagcttcagacgatcaatacttagatagttcgtgctgctgagcgagagtgaagtcaggcttgtcgaaagctccgcgatgctcaacaagtgggccgcacaggattgctggtttgtttgtgcatagacttgcaatctaagatggtgaaggcgactgagagtctgttcaatcggtatccgcaatgtgctgatattctcggcaaacaatggagcaagatcattcgtcatcggtaactgaagttcaagttctgtcaagttgggcagaggcacgtagcataacgacatgagcatcgagtcgatcgatgctttcatcttgtcatggggcaataatgtcaatgaaggaccacggaagtcgagagctttgagattgggaaattgacgcaagcataaagacagcaagccggcaaggtcttccgtgtatgatgtaacctcccttatcgagcatgggaaggaaccatatccaatatcgacttgacgcacatagtgggcataggggctgttagaaaggctcaccagctttcctaaggatggaaagtgcctggtgtggtacaatgaaccggctagggctataatgtggcggaaaagacgggctgaggcactatgacacaagcttttgttgaccaagcggagttttgcgagattcctccgattataattgttcattattcgaaattctcgaggagccgacgtctttgaagaagattgcgaagtgccgatctcgacataaaatgtaatctgccaaaagaattgttcagtagtggcgcagggtgtggactggtacaaatcatacaaggtcaattatctctgctggaaggtacatatcgatcaacgtttaagcatctttggcaggaaatcaccctgctaaaatattgactggcttcaagtgttgcgtgagcccctgcggtcttaccacccggtcccaaatttggaagagaacaggagcccacgtaagagaaagagattggcaatcgtcttcaattataccagcctattttatcttcggcgaaacacaaaaccaattttccgttgcaatgtaagaattttaacttgatcttggagtcaaaaacaaagcatcagacatgttctacccatggacatttaattgcattcccaaaatctagtcttggcgggaaaactagccattttgagacggttgaacgccacagtgggtccgtaacgtaaacattctgtactgtgtttgaccttcacaacactaccagtcgtcctctcaagcttgctctaatatgaggagaccctgtctgctgcatcgatgacgaaaaaatataaccatttctagcttttatacccgtgtcttagtctctagccaatacatttcctcttaagcgtgccctatgtacctaactaaatggtgtttgttctgttattgtaggttgaagaaagttcatgaaaacgcacggaaaacatagaaaaataccgggtatctcggagtatctctacttgattgctaattgatcatcgctgccctggggatatgtaaccatggatcctgctggtcggtatcccgcccgttctcggaccgaagagatgcacgtgcaccctggctgttctctttgcaactacttgggcggggatggtgatttcagatgtggctgataaatcattccccaatgtccttggatatataacttaacccaactcccgaataactgcattaatctggtaaaccttgagttatgacgaaatccgctaacttcggtacttccaatatgcggtgagtctcttcatgaaatcgataacattagttgtgctctaacgcccaattagaaatcaatccaatcatcccgccaatgctgaggaagaggcatattacgaccttggttcgtatcgtcgatcagtgaccacttcgtctgcggaaacccaattgtggttcaatcgcggattgaaatgggctcattctttcaaccatggcgaagcggtccgatgcttcgaacgagctgctgaaagcgattccaattgcgctatagcgctctggggaattgcgtatgcgactgggcccaactacaacaaggcgtggagatactttgacccagaggatcgtcaggcttctatcaagaaggtcaaggatatcctcacccgagcgtccaagctagcgagccaggccacaccagtcgaacaagcgttgatcggggcaatcggcgctcgtttcccaccaattgatgacatccccgaggaactgggccctttcgaccgcgcgtatgcggacgcgatgcgctctgtgtatcataagttcagagatgatgtggacgtggctgcgctatttgcggaatcgcttatgtgtatcactccgcgcgggctatgggacttgaacactggtaaaccaaccggggatcacaccattgaggctcgcgaagtgattgagctgcaactgcaaactaccggtcgcagccatccagcaatctgtcacttgcacatacacatgatggagatgtcgccatttccagaattggctcttccggctgcggatcgactacgtggcatggttccgcacgcttcgcatatgttacacatgccgacgcatattgatgccgccgtcggtgactatcgccggggtattgattccaaccatgaagcgatccttgccgacgacatctactttgcccgagagacgggtacaactatgtatgcggcgtaccgggtgcattacgtttgtgcaaaattgtattccgctatgatgtctggccgattcacggacgcgatgtccgctgcagaaaagcttgaacagatcaatgatccgaacctgctatccgtcaaaagtcccccaatggcagacttcatcgagagcttcgtgggaagtaaggcacacgtgctagtgcgctttggtcgctgggaagagattcttgacctcaagcttcctgccgatcgcgatacatattgcgtaactacagccaccatccattacactcgcgggcttgcattcagtgcacttggacggattgcagaagccgaagccgctcaaaaggagtttgaaatggcgcgtagggccgttcctagctcccgactcaacagcattccgtgcaaggaggaagatgttctcgcagttggatctgctatgcttgctggtgaattagaatatcggaagggaaatattgagacggcgttccattcccttcgggaagccattgtgcacgaggatgcactcgcgtacactgacccgcctgcctggatgcagccagtccgccatgcgctcggtggcctgctccttgagcaggggcgtatcgaagaagcagaaactctgttcaaggaagaccttggcttcgctcttgactatcctcggcgtaaggcaaaactcaataatgtttggggattgcatggcttatacgaatgcttcagtcgccttggaaagattcaagaggctgctttcattcaacctgcacgggatattgccttggcatctgctgacattccagtcaatgtttcatgcttctgtcgaacttcttcggtagcaaaggatggatgttgttcatgattgatcattgttgggtggcctgggggattaagcacgcacagtaaccgcacctgctgtttgctataaccatggagagctataaatagctttctttatttctccctcccgtccatcccgtttgataggaataagcatacagtttaagcatacattttctccgtacagatatccgtgtatgctgatttctagaactatcattttgctggggggtcacaatccggaaggcttcaagctgcacccgaaatatgttgatctcatccgtcgacacatcagtgctgggaagttgctttttacgacttacactggctcagccgtatttgcgtctacggggctattagatggaaagaatgcaacgatcaatcacgcggtgtataaatgggcgaaagagaattatcctgctgtcaactggactaagggggaaacatgggtcgtcgacgaaaatatctggactggagctggtgctgttgcgggtatcgatatggttgcaagttggctcaaggagcccttcggactggatattcttacatacgctgcccgcaatctggactacgagcctcgaggtatcgatggtgtctcgcttgtgattccgaggagatacgacgaaagcgggaagcaaatcagcacccatgaacttttctatcattagcctttggattttaaagatgtgaatttagggctccactggcggtacaccagttgagaaatccaaatgttgtcattcttattgggtattgtaccctaaagcccgtaggtatatatcaattccaagatccttgctagagcaatgcgctttccctacatactcaattcctcgctttcaataattggctacacaaggctactgttcgttccgtgaaaagatttcatatatgtcaggaattcgacgtgaactcaagatttagatataacctaccagctcaaattacctgatttagacaaagcaaacaaaataagtcatttattgttgattgaagggaactggacccgtcacagtcgagtggaaatcaattgcatggcgttggaagtgcattactttatcaaaatctcgatcgcatatattgcatgcgattttggtgttagctgcaaggttttgaagatgctttcgcttgatatgctttgaaacatcaccatgcgatgcaaattgctgcaaacgcttcttcatatctaaatctttttgtcctagacaaataaagcaaaaaagcggccgatgatcgttcgtgatagatcggaaagcagcctcaagaggagaatctgatttagacttgctttgggtcgcttcgtcatctgaggggtgattgccaagacaatcaagctcgaccacgttattctcaaaacgtttgttgcgcggcagacggcatgtttccccttcctcgaattgacagtaaaaagcgacagcatcgatggcttcagtccgccgacgcatctcctgatccaaagttggcggtggcagactcaacaggcattcgatcagacgcttttgaggtggaggaagctcctccgatctttgcaagttggttttgaccgctttttcaagcgtagcctcagacagctgtcgttgaacttccagcataggttgctcttggtcatatttctcctgaatctgtgataacaacgcatttctggcccgttctctcgcgccgttgatttcttgattcagctttttataagcgtcgtatttaacagtgcctcgatgccgcgagaggggtcggcctagtttttgacgaagctcgtcacgacgctggaccaatgatagaatttctggcctttggttgacagaggatgattgcacagttgtcaggtcttgcggccggtttgggtcgatggtcctgctcatccggcaggctgcgtgcatgatatcctcgtctggattaagaccgcgaattaaggcaggtaggtttttatcaatccttctatcaaggtagtactttagaaaggtgcgagtatcggcatggtgcataatcaaattacgaagagagtcgctcacggaacctaaattaaaagaagccatgattagcaagttgtgaatgcgcacgatatataaatatgcaaggtgagttaccgctattatccaacgctttggcagcgccatatcgcaagctgtaggggcgagcaacttgtcgaaatccagtgatgactccaattgttttgacccacggaagcagtgtagagtatggtagaggcttgtcgggggagatgctcattccttgcaatgaccgttctgtttgtcggaatactggaacatcgtctaaagccggatcgagcagtaatggaagttcattacaatcttctggaatatttagacgaggaagctgatctgcagagaacaaaacctcctgtccctcgacccgtttgaaagcacgatccccaaagagcaagcccagcaaagagacatgtggactgagaacaagcgatgggtcaaaaatgatctcaggaaggatataagtgttcctgcatgctggttaactatctgaagaccatagtaagtccttgatatatccactcactcgtctttcgtgccaaggaacccttttgtgaactcgaaggtgaactcaatcacgattctatgtgggccaccttgcggatctcgaagcaaactgattcgaatatgacggtacatcaaattcaatatggcttgaggacgattggcagtgaggccagcaagttgcaagaagaggcagagctcgatacgatgcctcccatgtccaaatttcttttttgtagtactgatcgcggtctcgacgaccattgtcaagtcctccacgtacatggtggacttttcacggcccttacgagataacttatgatttcgggataattttcggatgacctagaagagtggttaatgccaactatacggtgcggacttaaagtatatggtggacttttcacggcccttgcaggataacttatgatttcgggataaccttcggatgacctagaagattggttagtaccaattatacggtttaaagcgtctttggaaggacaacggtgccgtgattcggcaaaggggggattcttacccggcgcatctgtcgattcatgcgattttcaatcttgccagatgtggctctttcaaaaacaagtcgaaaaaccttccagaaagtttccagcgagctcttccgcttgattccgggtagtcgtcttccatttttccctcgtcgcagattcaaagcccaatccagaaaggtatacaagataccaacggataacttcaagaattcttgctgaggatcttttcgaatacatgcacagaacctgagacggctcttagttagtcatagtgtgtagaaatactaggagtgaaagactaggagtgctcggattcctaacgaagaagtgtaacgcactgattccatctcgtttcaacttggtcaaggagagacacagtgcctttgctgtaatcctcctgggtgtaaacggactcgtcaaactgctcaagttgctgcagatagtattctggcaaatgctcgttgtctgcaaagagctgcgcgacatcgccggcatccttcagctgatcgtcttcgcaatcaggctctgtgggttccgtttcatattggtcatcgccgctatcgtcggagctgtcggagctgagatgttcatcttcatacggaggagagttggcctttcgccgggaacgagccatgctgtggtaacgaggaatcgtccagtgaggagttgaggataaatgctcttggcaaaagagagccagggagggaaaaaagaagtgggaaaactcttttggaatgagtatcaaacatcgaaattccgacaagaccccaaggggaaggccccaatatatgaggccttccactgagcgcagcgtttccgtgccattgtgggaaaggctcctgagagaaaagagggacgcagcgttgacctgaatgaaaaacgcagcctgagtaccaagtgtggagaacaaaatgcaggtgcaacaccctcagggaacgctagaaaattgaggggtgtgctgcgccaagcggagattgcgtggccgtggtcagagatagaagtgcgtggcatgaaatttggcaaatcgacggcctaaaacggccgcacttgcggccatttttggaagcccgtttgccgtctgctaccttaataaagtatagataaagtagattttatacttaactataaccttattactaggtctttaaacttagtttttatagttaagaaagattctcttatactaatttctattaaccttacttatcgctatacctattatataggtaaggattaagtttagaaaatggaaatatatactaaaggtattaagttaaaaaaaggtactagagttacttatccctatataccttatattaaaggaaaaggatatatactcccttttaggaaagttagatctatctattcgaaccttagagaatttatctatctagatatctaaagttctatcttaattgctttatatagaggtaagagatattttattacctttatagataatactatacgttttacctaactattcttacttaagtctagattataggttactgaataatatatctagtttaagacctaccttaagacttagtttaggtatatagttaaaaaagtttatagggataatactatagagtataaacctcttataatttacctaaaatctaaaggaataatataggatcctacttccccttatataaagtagctaaatagtattatagagattaaaaattattaccttattaagcctttagtagctattataatagagtattagttcttaaagtacctctagggttatctcctagggggtattaactatataataaactatctttataccttaaaaattaggatatcgctatataaagcgctatatagtaaaaaacctaacttattaaatctttaggctctaggatactaatactagttcctaattcctaaagaaaaaagataaacgaagttagacccttatatagaggaagctagattaatcgcttataataaaggtaataactatatcctatataatatatagataaagaaaattaaatattctcgaaatattatctttaataaagtactaatactaaaggtatttcctaacctaaagtataatttaaatattaaaggtataaatttactatagtaggaggtttccccttttaatcgctatattctagttaattttttaaattaatacaattattatagagtacctatagagtaattcgacttctccttagttataaacgatatactataagtcctgagttatctacttttagtacctctatattttaatactcctctacttcccttagttaaggataatcttaataagagcctttttagcctagtaagtccttcccttaaacccttaaaccctataattcttaaagaataacttctagacctagaatccttttaacctagtaaataataataatattaatatagtaggtagctttagaaggtttatagaagaataataggataagctaagtacctatattaaagtagaactatagctacctatctaggaagaggttaaataaaatttctcctaggatttatcttaggatttatactatagttactcttattttaagttaaccctagataactgagcctttaacctaacttatatcttattattaagaacttaagaactagttaggaaaccttattattcctttaggtagtataaactaacttaagcttaccttaaaagcctttaaacttgttccttctttaatataaatgttttatatctacttattaagtctttagagattctacttaatctttactctatagtaatcttaaaagaaccttaatatataccttctaagctaaaacctactaatattagttttaagctaaaagattagaaggaagctatatcctatattaagaaagagaagtggcttactactacttataaagaactttcttagtaaataattaatagaatatagaggataatcccttaaggataaggaaggaagggttgtaaaccccttaccttatactaggtatttaaaatcaagtataataatacctataaagtgagacttattacttaaggcttttaataaattaaggatcttgatttctttaaagtttacgcggttattataaagctaatattatttaaaatctttatagctattatagctactataggttagctattatactatattaatattataatagtatttttatatattaagttaaaagaacctattaaaattgaactctctaaagggtaaagagaagaatttcctaattagattagtttcctaataaaaactatttatagcttaaaatagagtccttataaatagtattaactactatataatatactgattactataggatttagtaggatataatctaatcactctatcttttttaagaaggaatataggaagcttcctatctttattataatctatatcgataacctcctagtcttatatacctctaagagcgatatttaagaatttaagattataatctcgaagtactttaatatttctaataaaggatatcttaaacgatatcttataataaacgttttttataataaaggaaaaattctcttattataattcgactatatagagaagatccttatatactttagacttaaaagctataaactagtagctatacttatagataaaaaaatagccttaatcccctataagggtactataactaagttatagattaaggaattttagataaaggttagaactttaatatagcttatagtttcgataaggcctaatatctcttttatagttattaaacttatatagtatgcgaagaaccctagtaaagcctacttctaaatattaaagagggtatttaggtatcttaccggtataaagaatctagtcctctcctattctatagaaagagaagctttactctctagttattataatatagactaggtaggtctatatagtaaaaaaggtctattaacctctggttttatttttaaaataggaggtagccttattttatagatattaaagaaatagccttatatagtactatctattacagagagcgagtatattacagaagtactagcggtataggaagtaatctagttatcctaactgctttctaagatcggtatcgaaggcttcttagtaaagctaattcctatctatactaataataatagggcaattgcgcttaccttaaatcctgaattttatataaatataaagtatattataatccggttttatagacttcgagaggaagtcgcgaatggcttagtgaaatttgttaagattcctactaccgagatagtagtagatggacttacaaagccacttagaagagttatatttaagcgatggatttcacagatcggcctctcggtctataatataggttaagtttatatatatatataagtaggtatctggttttgtttttttatagagagatagtgtttaaactacgctggaaactcgactatttgttagtcgtggggggtgttcgaagttatgtgacctctctccgctcctaacaactatgttagtcctagcagataggtagtttccttttctctcttcacgcaattcatgagaactttccagagtgtctacatttcatccgtagactccttgattcatctctaacaattaattataacgatcatacgattacagagatctcctcaaaacaacactaatgcacgggcgtacatttctagcttagtgcgagcgacgatctcccaggatctggcgtactagttagagatcgagtattagttattgatgaaggtgcaggctacgagaagaagggtgatcaaccagaaagatgatgatatgaagtggatgaaagatgctgatctagctactgccaagaagctctctatatagctccatgctacaaagctaccagatcccatcctccagaaaccagaagaaacatctctgcaggcgtacaaagggaatgccaacacagcaagctgaacggcaagctgcatgcgagagaaacgaaagaaagagagaggaatgccacagagagggctatgaacagcatggggcaacagtgaatacttccaaatgcatcatcatttatgcggtgcgccggactgcgggagatcgtcgccgtagtcgcccgccctaagcctgctatgattcacatcgctgtaatccgtatttcaactctgctaaattcccctaggcagccagcgtatctgaccccaaatatcgagtcatggacacgcctgttgatcttttttaaattcccagtgggtctcctacttaaacagtgttagtgttgtcctaacgaaattgcgctaagcttatttataataacaatagcgcctctggaaaagtcgagtaactcatagatttatgatgatcgtataatcttcctataactaatgctcgatcctgcggtacttctgacactcgacccttggtatcgagttttcgtaagggctgtgtttccaccccaaaggcaaccttgtccatgaaagtattcctgccgggttattttctccataagggccacgttaagattaatagatttaggggattcagggattctagtttctaactattcaatgttgttatgtttggtgttccgaaattccgagggatccccgaccgggtattcctgacctgctaacccctgctagccctattcctgcttcgtttctgaacgcgatgcaacatcaactaatgtaggaggatacttacctgcgctggaagcttgatggcaacgaggactgttcaaatccctcaagcactgtagtcattgatcgctattcaacagggattctgggcagggcaacaacaagcaccatagaccaattatgggatatagcatagaaatatctagaactgtctacctttatgtgacaatcaatgaagcttcttaggagaatcggcggcgtatattcgggctaccgttttgagctagtaatgcagtggccagagggtgcttaggaatactacataggttagggtaagttatacattttctatagagttgatggatctacagaactacttcaactgaggccgaaggatcatggcttattgatatttttgggtatatcaggcgcattaacatgagcctcgggcttcacagaacatagtaacaccatatctacaacgtgtgctcatctttgaccaaatatagtatggaataattgcttgtaaagtatgctggatggcttagcctgctccgaaccctgccattgtagtcgcttattaaagaaacattatcaccagggtctgataccaatctagttaatgatatgcaaaggtggccacgacttccgtcctatgtctatgtatagctggtgctgtgctgtaggacatctccttgactaggcggatatgaaagggtcgatgctcgctatctctgggcggcttctctactaccaacgcactcatctttctatcgttctctgaccaagagccttttatcgaaaccatcacaatgtcgcttctcaaccacgccgtttatgctgtaactgttctggccaccattgccgcagcagtccccagcctaatcgctgccaggggtgaaaatttcctcgttttcaatggcaatagatcccttttggttgaaaccaaaccctctgcagagaccgcctaagacttgatagccatggccgagggaaatatcgattgcaagggctctgctcggtggaaaaactcggttctggctgtcacgatgcttatcggtaggttattcccagcaatacctacggcacttacctcgagtatgtttttcgctaactcgacaaagccattccaatactggatcttgtagtggaccctgcggtctttttttcaacggcaacactgtgaacttatagggcaggatttgatggacgcctacaatgaacttcggaaccgaggccattgcagccattgtggacgcaaacaaatcgctaacagctgtatgatcaagattgaccgggtcatgggttgctaaatggggctgcgccgtgttaatcggataggaggtgcataccatatacatctatttatggtcacagggtcgcagttttggctttcatctagtcactcatgggtgaatgggcttgcacgagtttgaagatgagaaatgctaccgacacgcgaaaattgctaccgtcacgttgcccaccatactactttaggtaagtctcccgctggccgcaattttcaaccagcctttgtaannnnnnnnnnnnnnnnnnnnnnnnnnnnnnnnnnnnnnnnnnnnnnnnnnnnnnnnnnnnnnnnnnnnnnnnnnnnnnnnnnnnnnnnnnnnnnnnnnnnnnnnnnnnnnnnnnnnnnnnnnnnnnnnnnnnnnnnnnnnnnnnnnnnnnnnnnnnnnnnnnnnnnnnnnnnnnnnnnnnnnnnnnnnnnnnnnnnnnnnnnnnnnnnnnnnnnnnnnnnnnnnnnnnnnnnnnnnnnnnnnnnnnnnnnnnnnnnnnnnnnnnnnnnnnnnnnnnnnnnnnnnnnnnnnnnnnnnnnnnnnnnnnnnnnnnnnnnnnnnnnnnnnnnnnnnnnnnnnnnnnnnnnnnnnnnnnnnnnnnnnnnnnnnnnnnnnnnnnnnnnnnnnnnnnnnnnnnnnnnnnnnnnnnnnnnnnnnnnnnnnnnnnnnnnnnnnnnnnnnnnnnnnnnnnnnnnnnnnnnnnnnnnnnnnnnnnnnnnnnnnnnnnnnnnnnnnnnnnnnnnnnnnnnnnnnnnnnnnnnnnnnnnnnnnnnnnnnnnnnnnnnnnnnnnnnnnnnnnnnnnnnnnnnnnnnnnnnnnnnnnnnnnnnnnnnnnnnnnnnnnnnnnnnnnnnnnnnnnnnnnnnnnnnnnnnnnnnnnnnnnnnnnnnnnnnnnnnnnnnnnnnnnnnnnnnnnnnnnnnnnnnnnnnnnnnnnnnnnnnnnnnnnnnnnnnnnnnnnnnnnnnnnnnnnnnnnnnnnnnnnnnnnnnnnnnnnnnnnnnnnnnnnnnnnnnnnnnnnnnnnnnnnnntgacggaaaaacggtggtaaggcgagtgtattttgtggcagaaaaatcttaataaattctctaactctctaaaactgacaatagtcctaaaacatgacaatctgatggacaacttaggaatcaaaacaaacaaaataaaagaaagggtgtttttttgggcgaaaaaccactgagttagtttttctgcagaaaaaccagcctggtcaatcacgtgacccagctgtatcagggatgaaaaatgacagtattcatcctagattctgacatgttgtcttattggctaatcgcttcataccgcctacgagcagttctgcccgtcataccccatcaaaatccatactcctttccacctcatttctctacaacttcattcaggcagcgttgtatagttacggagtagggagtaccagatcaagttgggtacgtacccgggccgcgcatcctatacctctttgattaacttcgttgaatcaagtgtcatacagaatctctgattgtttccgtcacttaaacagcattatacccctagagatttgcaattttatgaccaccagtcggagtcgggaatttttgctacgctggtcacgtttatattttggattaattcattcatgtctaagtacagcatcgttgaaagatttataggacgccctggggcggccgacaatcttgttggagataatgtcacattggtccttaaagactaggacaaagtaatccggggttaaagctctttcaaatgtaccaaccgtcccagaattctcatggtgaacatttggctgctgcttcacttttgaggccaacccccctaattgggataggaaaaggattttagggttacatttgggcggtcttagctagtgggtctagtggttcttagctcggcattaactgacagctcataaatgtcagatcccgttcgttcagatcccgttggtcaaaacggttagaggggctggtcctgtgggtcatttagttgcatctaaatgtggactaggtgacccgttcgtggatcatacccttacctgtctagggaaaaggtctccgttgtccctagttcttccccatgtagactaagacaatctctgagctggcttattcttctgccttgaaggaggcttttggtgttctccttaatttcccccaggtatcccacttaccattctcgtcatattcaagcttctcaacatgcaccaatcatggaacaagtggtgttaccgtcactattcccttcggcggatgatatccacagtcgccattggcgcttgtggtgtttttatctacttaatatggtttgggatgaactcagaccgtgataatgtgccccagctcctcacacaacttatcccagcaggtcactgcacctgccaatcatctacttcatttcaatgcgccgactgcctcacctgtctagcctcgccaccgctattggaaccagaacaccatgaaacttggagtttccaatacggaagagacgaccaaaacctaggcctgagccagattcagtgtcaggcagcattccccggtctcttccaggacatccagcgaggggttgcgtattggaagtcgcaagggagcatatcaagaaacgatctgagcatggtcccattccgagatggtatggcccgcgctattatctccaacggagaattgtacgtcgtggcgacaagagcaaaatgggatgatcatcggcgcaagatccttagtactctagggtctatccatcgggcactatctgcgtcctcaaatcgtacctcgcaccccacaatcgagtttatcttctcgatcgaagatcgcgtggatgacgttgatgcggccagccacccggtctgggtgttatcaagaaaagcatctgaggagtcggtcattctgatgcccgacttcggatactggtcctgggccaagagtaacatcggcccatacggacaagtcgtacagagcatcatggcggctgaatctaatatgaaattcgcggataaagaacggaagctggtctggcggggtaagttgagctttgcaccaaagctgcgtcggacgctcttggacattgcccggggtaagccttggggtgatgtgaaggagttggattggagcaagaaggtcaacttcttgtcgatggaggatcactgtcggaccatgtttatcgcgcatgttgaaggtacgtttttttttcacaacccaaatttgctatacaaggctgacagatatcgtcgatattcaggccgcgcatactcggcatcgcttaaataccgacaagcctgtcggtccgttattgtggcgcataagctgcagtacatccaacatcaccactatctcctcgtatcgtccggtccggaacagaactacgtggaagtcgagagagacttttccgatcttccgaatctcatggacgaactgttggagaacccggacaaggcagagcgtatagccaataacagtatcaaaacctttcgagaaagatacctaaccccagctgctgaggcatgctactggagagctctgtgggagggatgggctgaagtctcggcgaatgtcacacgcgacgttgaaccaccggttaataggggacttcggtatgaatcttttgtgttgctagacagtaacgatatgttcaagttcgacatgtcgaacagcttttagataacagcaaacggcttaactagttagcttcaatccagactagcttcgtcccttcacaccgacgctccattccgagccttccggtaagaccggagaatatagaacttcccctgtgggtcactagttagtaccgtgaataaacgcactattgacgtaaatatctgctttcttccgtctaaaatttttaaactatacagataggtcctaggagcgttattaaacttggtttgattgataaatacaatctccggctttatctcggttacaaaatttgtggaatctaatcatggtaaaggattacgcagatatagtataagctagagaactaggagtcccctctagtgcggttgtagtaaggctaaaatttatgattagaggatctataatggaatgccgtacaatttgtatatgaactgtcacgacctgcaatagatcgctatcatatgctttatgtacttgctcgcttactgatttcatcgtttatctcattacatagattgtttgctagattgctaagcgagaaggttcgaggtttgcaacgtttgcaaagagtcaagaattgccgtgtaaagaaaatagatttatgtggcaaaaacaaagccaaaaacatacaacagtgaggattcgctggtggtcacccacccaactactaactcaccggcgnnnnnnnnnnnnnnnnnnnnnnnnnnnnnnnnnnnnnnnnnnnnnnnnnnnnnnnnnnnnnnnnnnnnnnnnnnnnnnnnnnnnnnnnnnnnnnnnnnnnnnnnnnnnnnnnnnnnnnnnnnnnnnnnnnnnnnnnnnnnnnnnnnnnnnnnnnnnnnnnnnnnnnnnnnnnnnnnnnnnnnnnnnnnnnnnnnnnnnnnnnnnnnnnnnnnnnnnnnnnnnnnnnnnnnnnnnnnnnnnnnnnnnnnnnnnnnnnnnnnnnnnnnnnnnnnnnnnnnnnnnnnnnnnnnnnnnnnnnnnnnnnnnnnnnnnnnnnnnnnnnnnnnnnnnnnnnnnnnnnnnnnnnnnnnnnnnnnnnnnnnnnnnnnnnnnnnnnnnnnnnnnnnnnnnnnnnnnnnnnnnnnnnnnnnnnnnnnnnnnnnnnnnnnnnnnnnnnnnnnnnnnnnnnnnnnnnnnnnnnnnnnnnnnnnnnnnnnnnnnnnnnnnnnnnnnnnnnnnnnnnnnnnnnnnnnnnnnnnnnnnnnnnnnnnnnnnnnnnnnnnnnnnnnnnnnnnnnnnnnnnnnnnnnnnnnnnnnnnnnnnnnnnnnnnnnnnnnnnnnnnnnnnnnnnnnnnnnnnnnnnnnnnnnnnnnnnnnnnnnnnnnnnnnnnnnnnnnnnnnnnnnnnnnnnnnnnnnnnnnnnnnnnnnnnnnnnnnnnnnnnnnnnnnnnnnnnnnnnnnnnnnnnnnnnnnnnnnnnnnnnnnnnnnnnnnnnnnnnnnnnnnnnnnnnnnnnnnnnnnnnnnnnnnnnnnnnnnnnnnnnnnnnnnnnnnnnnnnnnnnnnnnnnnnnnnnnnnnnnnnnnnnnnnnnnnnnnnnnnnnnnnnnnnnnnnnnnnnnnnnnnnnnnnnnnnnnnnnnnnnnnnnnnnnnnnnnnnnnnnnnnnnnnnnnnnnnnnnnnnnnnnnnnnnnnnnnnnnnnnnnnnnnnnnnnnnnnnnnnnnnnnnnnnnnnnnnnnnnnnnnnnnnnnnnnnnnnnnnnnnnnnnnnnnnnnnnnnnnnnnnnnnnnnnnnnnnnnnnnnnnnnnnnnnnnnnnnnnnnnnnnnnnnnnnnnnnnnnnnnnnnnnnnnnnnnnnnnnnnnnnnnnnnnnnnnnnnnnnnnnnnnnnnnnnnnnnnnnnnnnnnnnnnnnnnnnnnnnnnnnnnnnnnnnnnnnnnnnnnnnnnnnnnnnnnnnnnnnnnnnnnnnnnnnnnnnnnnnnnnnnnnnnnnnnnnnnnnnnnnnnnnnnnnnnnnnnnnnnnnnnnnnnnnnnnnnnnnnnnnnnnnnnnnnnnnnnnnnnnnnnnnnnnnnnnnnnnnnnnnnnnnnnnnnnnnnnnnnnnnnnnnnnnnnnnnnnnnnnnnnnnnnnnnnnnnnnnnnnnnnnnnnnnnnnnnnnnnnnnnnnnnnnnnnnnnnnnnnnnnnnnnnnnnnnnnnnnnnnnnnnnnnnnnnnnnnnnnnnnnnnnnnnnnnnnnnnnnnnnnnnnnnnnnnnnnnnnnnnnnnnnnnnnnnnnnnnnnnnnnnnnnnnnnnnnnnnnnnnnnnnnnnnnnnnnnnnnnnnnnnnnnnnnnnnnnnnnnnnnnnnnnnnnnnnnnnnnnnnnnnnnnnnnnnnnnnnnnnnnnnnnnnnnnnnnnnnnnnnnnnnnnnnnnnnnnnnnnnnnnnnnnnnnnnnnnnnnnnnnnnnnnnnnnnnnnnnnnnnnnnnnnnnnnnnnnnnnnnnnnnnnnnnnnnnnnnnnnnnnnnnnnnnnnnnnnnnnnnnnnnnnnnnnnnnnnnnnnnnnnnnnnnnnnnnnnnnnnnnnnnnnnnnnnnnnnnnnnnnnnnnnnnnnnnnnnnnnnnnnnnnnnnnnnnnnnnnnnnnnnnnnnnnnnnnnnnnnnnnnnnnnnnnnnnnnnnnnnnnnnnnnnnnnnnnnnnnnnnnnnnnnnnnnnnnnnnnnnnnnnnnnnnnnnnnnnnnnnnnnnnnnnnnnnnnnnnnnnnnnnnnnnnnnnnnnnnnnnnnnnnnnnnnnnnnnnnnnnnnnnnnnnnnnnnnnnnnnnnnnnnnnnnnnnnnnnnnnnnnnnnnnnnnnnnnnnnnnnnnnnnnnnnnnnnnnnnnnnnnnnnnnnnnnnnnnnnnnnnnnnnnnnnnnnnnnnnnnnnnnnnnnnnnnnnnnnnnnnnnnnnnnnnnnnnnnnnnnnnnnnnnnnnnnnnnnnnnnnnnnnnnnnnnnnnnnnnnnnnnnnnnnnnnnnnnnnnnnnnnnnnnnnnnnnnnnnnnnnnnnnnnnnnnnnnnnnnnnnnnnnnnnnnnnnnnnnnnnnnnnnnnnnnnnnnnnnnnnnnnnnnnnnnnnnnnnnnnnnnnnnnnnnnnnnnnnnnnnnnnnnnnnnnnnnnnnnnnnnnnnnnnnnnnnnnnnnnnnnnnnnnnnnnnnnnnnnnnnnnnnnnnnnnnnnnnnnnnnnnnnnnnnnnnnnnnnnnnnnnnnnnnnnnnnnnnnnnnnnnnnnnnnnnnnnnnnnnnnnnnnnnnnnnnnnnnnnnnnnnnnnnnnnnnnnnnnnnnnnnnnnnnnnnnnnnnnnnnnnnnnnnnnnnnnnnnnnnnnnnnnnnnnnnnnnnnnnnnnnnnnnnnnnnnnnnnnnnnnnnnnnnnnnnnnnnnnnnnnnnnnnnnnnnnnnnnnnnnnnnnnnnnnnnnnnnnnnnnnnnnnnnnnnnnnnnnnnnnnnnnnnnnnnnnnnnnnnnnnnnnnnnnnnnnnnnnnnnnnnnnnnnnnnnnnnnnnnnnnnnnnnnnnnnnnnnnnnnnnnnnnnnnnnnnnnnnnnnnnnnnnnnnnnnnnnnnnnnnnnnnnnnnnnnnnnnnnnnnnnnnnnnnnnnnnnnnnnnnnnnnnnnnnnnnnnnnnnnnnnnnnnnnnnnnnnnnnnnnnnnnnnnnnnnnnnnnnnnnnnnnnnnnnnnnnnnnnnnnnnnnnnnnnnnnnnnnnnnnnnnnnnnnnnnnnnnnnnnnnnnnnnnnnnnnnnnnnnnnnnnnnnnnnnnnnnnnnnnnnnnnnnnnnnnnnnnnnnnnnnnnnnnnnnnnnnnnnnnnnnnnnnnnnnnnnnnnnnnnnnnnnnnnnnnnnnnnnnnnnnnnnnnnnnnnnnnnnnnnnnnnnnnnnnnnnnnnnnnnnnnnnnnnnnnnnnnnnnnnnnnnnnnnnnnnnnnnnnnnnnnnnnnnnnnnnnnnnnnnnnnnnnnnnnnnnnnnnnnnnnnnnnnnnnnnnnnnnnnnnnnnnnnnnnnnnnnnnnnnnnnnnnnnnnnnnnnnnnnnnnnnnnnnnnnnnnnnnnnnnnnnnnnnnnnnnnnnnnnnnnnnnnnnnnnnnnnnnnnnnnnnnnnnnnnnnnnnnnnnnnnnnnnnnnnnnnnnnnnnnnnnnnnnnnnnnnnnnnnnnnnnnnnnnnnnnnnnnnnnnnnnnnnnnnnnnnnnnnnnnnnnnnnnnnnnnnnnnnnnnnnnnnnnnnnnnnnnnnnnnnnnnnnnnnnnnnnnnnnnnnnnnnnnnnnnnnnnnnnnnnnnnnnnnnnnnnnnnnnnnnnnnnnnnnnnnnnnnnnnnnnnnnnnnnnnnnnnnnnnnnnnnnnnnnnnnnnnnnnnnnnnnnnnnnnnnnnnnnnnnnnnnnnnnnnnnnnnnnnnnnnnnnnnnnnnnnnnnnnnnnnnnnnnnnnnnnnnnnnnnnnnnnnnnnnnnnnnnnnnnnnnnnnnnnnnnnnnnnnnnnnnnnnnnnnnnnnnnnnnnnnnnnnnnnnnnnnnnnnnnnnnnnnnnnnnnnnnnnnnnnnnnnnnnnnnnnnnnnnnnnnnnnnnnnnnnnnnnnnnnnnnnnnnnnnnnnnnnnnnnnnnnnnnnnnnnnnnnnnnnnnnnnnnnnnnnnnnnnnnnnnnnnnnnnnnnnnnnnnnnnnnnnnnnnnnnnnnnnnnnnnnnnnnnnnnnnnnnnnnnnnnnnnnnnnnnnnnnnnnnnnnnnnnnnnnnnnnnnnnnnnnnnnnnnnnnnnnnnnnnnnnnnnnnnnnnnnnnnnnnnnnnnnnnnnnnnnnnnnnnnnnnnnnnnnnnnnnnnnnnnnnnnnnnnnnnnnnnnnnnnnnnnnnnnnnnnnnnnnnnnnnnnnnnnnnnnnnnnnnnnnnnnnnnnnnnnnnnnnnnnnnnnnnnnnnnnnnnnnnnnnnnnnnnnnnnnnnnnnnnnnnnnnnnnnnnnnnnnnnnnnnnnnnnnnnnnnnnnnnnnnnnnnnnnnnnnnnnnnnnnnnnnnnnnnnnnnnnnnnnnnnnnnnnnnnnnnnnnnnnnnnnnnnnnnnnnnnnnnnnnnnnnnnnnnnnnnnnnnnnnnnnnnnnnnnnnnnnnnnnnnnnnnnnnnnnnnnnnnnnnnnnnnnnnnnnnnnnnnnnnnnnnnnnnnnnnnnnnnnnnnnnnnnnnnnnnnnnnnnnnnnnnnnnnnnnnnnnnnnnnnnnnnnnnnnnnnnnnnnnnnnnnnnnnnnnnnnnnnnnnnnnnnnnnnnnnnnnnnnnnnnnnnnnnnnnnnnnnnnnnnnnnnnnnnnnnnnnnnnnnnnnnnnnnnnnnnnnnnnnnnnnnnnnnnnnnnnnnnnnnnnnnnnnnnnnnnnnnnnnnnnnnnnnnnnnnnnnnnnnnnnnnnnnnnnnnnnnnnnnnnnnnnnnnnnnnnnnnnnnnnnnnnnnnnnnnnnnnnnnnnnnnnnnnnnnnnnnnnnnnnnnnnnnnnnnnnnnnnnnnnnnnnnnnnnnnnnnnnnnnnnnnnnnnnnnnnnnnnnnnnnnnnnnnnnnnnnnnnnnnnnnnnnnnnnnnnnnnnnnnnnnnnnnnnnnnnnnnnnnnnnnnnnnnnnnnnnnnnnnnnnnnnnnnnnnnnnntggcttaagtacggctgagcggacgggaagccctattttccacaccctatggtcgtatatactattatgttctagtatgctaactatatcctattgtttaccttttgctacctattactattcttattctagtgattcaactagcttctcttttcaagtctatatcaagtgctgcggctcactaatccatagttcgtgggtttatttcatttggcaagtgaagaacaagcatctctgagtcctaccgacccattcatctccatcttcggctttcagccgcgatatatttgaaaaagccaggaggaaaagaactcggatgtgaacagcaaagatattatatgaaatatagctaactacgcatagatggaaatacctcattttttcgttcacgttcttccttctctttaaccatcttctcactctgtcacaattcagcaacagcacctatcttttctcacgttctaacctacaatcaattcctattttcattaaaccattttagccaatggctaagtaggtctctatggcttctgtagtggctaaattgtactaaccttattagtcgtctccccgagcctacttcggcagaccagggaatcccagtcctcatcccccctatctccccattctatattagaagccgaatggagccctggtggctctaggctcagtaggctcagagaattcatgagctgttgtgttcaaatcattgtaatgatcatttttcggcaatgaggttaacgtgaatataaatcactatatcaatatcgtgtaaagatatcagtcaaattgcccgcattctaaattttatatctgatattggttgattacctgctcaagatcccactaacaggacccttagcgttcctagaatcatacttggccccatgatacatggcatggtccccaggcacaataattattgctcccagagtaggaataattttcccacagggcctataattccggggaacgagaggtggtagagagtacgggcgactccaccaaagtgctagggaggtcgtgctacttcaaagtggcggaaggtaataccgaactgatcatataagagggtggtcgagttggtacagtataagccccttatattcgttcttaccctcccataaattgaggagctaaacccccaatttgctccaggcccaagtattacctcaatatctgtagatttaatatatctcattttggcgctttactgtacgaatctatgaacaggaagtaaatggttaaattgcgcggccgaagcttctccaaatcaccctcaatctgcaactattgaaatgaaaccagtctcgcttgggacaggaagtcctctagacctaagcttgctagcccttttagctcttttctttgaggacatatttgcccaattcccatacagacttaagtccgaccatgagatcctcgctatgtagccctgatcagtagcctctggtagtatttcagtattagacgtatcaccgggtgacaaagaagcgcgcgaccagctgtcagtatcagcagacacttgaggaatgatccactgttcgctacctccctcagcaggagactcttccaggacaggctcgagctcaggctctggttcaggcgattcgacgacaggctctggtacagcctcttcgaaggcaggctctggtacagcctcttcgaaggcaggctcaggctcaggctcttcgaagacaggctctggtacagccgcttcgaagataggctcaggctcaggctcttcgaagacaggctctagtacagcctcttcgaaggcaggctctggtacagcctcttcgaagacaggaaggctctggtacagcctcttcgaaggcaggctctggtacagcctcttcgaaggcaggctctggtacagcctcttcgaaggcaggctctggtacagcctcttcgaaggcaggctctggtacagcctcttcgaaggcaggctctggtacagcctcttcgaaggcaggctctggtacagcctcttcgaaggcaggctctggtacagcctcttcgaaggcaggctctggtacagcctcttcgaaggcaggctctggtacagcctcttcgaaggcaggctctggtacagcctcttcgaaggcaggctctggtacagcctcttcgaaggcaggctctggtacagcctcttcgaaggcaggctctggtacagcctcttcgaaggcaggctctggtacagcctcttcgaaggcaggctctggtacagcctcttcgaaggcaggctctggtacagcctcttcgaaggcaggctctggtacagcctcttcgaaggcaggctctggtacagcctcttcgaaggcaggctctggtacagcctcttcgaaggcaggctctggtacagcctcttcgaaggcaggctctggtacagcctcttcgaaggcaggctctggtacagcctcttcgaaggcaggctctggtacagcctcttcgaaggcaggctctggtacagcctcttcgaaggcaggctctggtacagcctcttcgaaggcaggctctggtacagcctcttcgaaggcaggctctggtacagcctcttcgaaggcaggctctggtacagcctcttcgaaggcaggctctggtacagcctcttcgaaggcaggctctggtacagcctcttcgaaggcaggctctggtacagcctcttcgaaggcaggctctggtacagcctcttcgaaggcaggctctggtacagcctcttcgaaggcaggctctggtacagcctcttcgaaggcaggctctggtacagcctcttcgaaggcaggctctggtacagcctcttcgaaggcaggctctggtacagcctcttcgaaggcaggctctggtacagcctcttcgaaggcaggctctggtacagcctcttcgaaggcaggctctggtacagcctcttcgaaggcaggctctggtacagcctcttcgaaggcaggctctggtacagcctcttcgaaggcaggctctggtacagcctcttcgaaggcaggctctggtacagcctcttcgaaggcaggctctggtacagcctcttcgaaggcaggctctggtacagcctcttcgaaggcaggctctggtacagcctcttcgaaggcaggctctggtacagcctcttcgaaggcaggctctggtacagcctcttcgaaggcaggctctggtacagcctcttcgaaggcaggctctggtacagcctcttcgaaggcaggctctggtacagcctcttcgaaggcaggctctggtacagcctcttcgaaggcaggctctggtacagcctcttcgaagataggctcaggctcaggctcttcggggacaggttcaggatcctcaggggatggccctcgaagaggggattcttctgaaatgatgccgttcagtatctttgctaatgattcccaaaagaattagttcagtctgattaccatatgttgaatatgttgaagataatttaccgtgctgatctttcatagaacataagctaatagatagcatctcgagaatcatcttcatcactgcattatcaaattgatggtcctggccgagaatattgtaaaatgcgtgtaagtcaagccctgcaacttcaggctttggtagtcgctgcaggtttcctcgaatgtaacttggaagccaggtttcatctgcaggaagtcttgaaaacacgtccctcacgacccgcagtatttcaagaataggaaggtccttatctaagtgctccatcttctgcttagcaaggatttcaaggtcagttaggccccaagtccttaatgcataatagactagaacgctcctcttatattctctggcgagatctgatacaccttcatcaagaggcgagctgactgtctcgtagccgccggtatataagaagtgcagcacggtatacccgacatcttcattaacattaggcatgatgatagtcgatgacccaggagaggaaggggtaagctttaggtaattccgaaggaaataagcgggaatgccatattgcttgctccctataatgaaggtgacgagagggaactcgtagggccagtaaataggtcagaaaacgctagttttgacttattcgaagaactcacgatgacaaaggtcgatagtagtcaattttaggagagacctctggggtaaggagtcgcttaggctcctcattcgagttacgctgcttcgttttcttttttgccatgtttcagtcttcaacttcgccagctatcaagtgactctcataaaattttcaaggaaaggtatcaagaattaagatgagaggaagcctgactacatcttatatatgcggaggataagggataagtagggtaatgcaagtatgagttgtcctgcaaagtggtcgaaacatgccatctgtgccctgaatggcaatttagtgtcaaggattgaaatgcagcatgagtcagtagatggcttattacatatttcagctggttatcacttctgaggagttttcggtttgggaagacgaatctgcgccgctcaattctaagtgtgctggaagcaaaatgtgatatccctggtaatcctggactcctatcagttgctgtcctgtcagaaaccttccataatttggtaccgtatcaccgcttccaagacagatggtgcttctaagctgtgagcagcgaattcacgtggtgctataccatccaatggattatgtccaggacacgtgtggttttcgttagcgctaaagtttcatatagtggcgtactcaccacaatcctatgggtagctgaattatcactttacaattcacaaaacaacatcgctcttagaatcacctgcagagtctttcatctatcttttccttattcgccaatctcccattcggcaaaggacagccataccctagaggctccatgataactagacaaaaggtacacacaaggtaaggccagatcatgcaggtatgtgttggcagcccatgcagggtaggacacaagaattttactgatacaaaggcccgaggaactcagcccaaagctcattctccttggctaatataataccaccaacgaagcaaggcaataatgggttttctctggatcgcaggcatacctcgtccgaagttgacagattttgagaagatcgggaaatccattacggaagtggagcatttgtcttaaattggattgaatcgtccagctctacattgatgtccccgaatgcccgcctctttgatctccacccaaaacccctccaaaaaaaaagttgccaaagactcttggcccatttacattgctcaaaccgtgtttcgtcatcctgacaattcactcgcactacttttccgttcgctgtacattggaaacccttcaaaaagcattcaccaatttgacttgataaccggataaccgatcgaaagaacatcatgggtaaccggcaagtgagcaagtaatgaaagtcactatttacaagctctgttgctgattaagcccccgggctgtcacttggatataggagtgacaattggaagcattcagcttgttgactgacgagataatttagtttatgtctagcatatacgcataaatccaatccatcctttagtttgctaatattcgaacccgttccccgattccaaagaaaaagaaaagaaaatacaaaaagaaaagaaagacgaaaaaaaagttctaaatctgcttcccaaatggctcccccttcgtcttcccttccgtatgcggaggcagtttttcacgatacccaaactcctgctatttaatatgaactcggttgaatctttcataggtcttttcattcttattacgatccacattggctaagcatttggtaacatccttttcaattgaatccatggcgcggttcttgaaccacgcagtttgtccctcgtcgctttgtttcgtgacgggggtgtatatggctgtgtggcatacctcttctgtcccggtcatgttgtcggtcttgctcttccaggggcagcggtaggtgtagcggcagtagaggaagcctggtccgccgtgggacattgttgttcttgggtctgggttggttatggaggaaatttatactcccaagtccttcaaggagagaattttacgctatgtgaaataaagaagtataggagaagaaacagaaacaatattgagcaagttgataagaagtagaagacggtatttgagccaaggtgggaaagactggagaactatacccctcatttacttctaaaagtgaggggtaatcacaaggcggtgtttgaagcgctactcgacacgtcgctgcccaaatgagatttgttgggcagtgacgtgtcgggtataggaaacgagacatatggcagccgatagcgctcatatatcactgacgaaattcgtaccacttctccgcataaagctttaggctagactaaactattggccagcccgaccattttgagtgaggctcaaacgcggccattagtcgggtggatgccgcccgggtgagaatttagtgagcgccgcttttgagtcgcgcggcagggagtgagcaggctgagttgattatagatgggaaggtgggccaggtgagatcttccctgacgcgcgattcgcgcgaccactcgagccgagtaaccatgatcaaaattaaccttgtaataattggaccatcacatacccttcaggcattagccatcttagcacctatacatagccacaaagcaatctgtaatcaataatcttgtcacatcaaatgtgtgcctgatttgttgtttatctaagcgcgatccctacattcagccataaagtacggggagaaggctatatggcagggccatatagtgagaagcgggtctaacccgttacaagagaagagaaataggaggagaggctagctaggactatctaccatatggaggcatcacgtggaatcacgtgatcctcccaataagatctaagcgatctagggtagtgggaaatgtatacggtgtaggactccctacgtcggtcaccaactatgcggctaaaaggtaaggctacccgttctaacccgaaccgggattaataacaaatagccaactaggcttacataaggttccactgctaggaaaataactcaattaactcctactagctagctagatcttagggggaaagatgaaggtatttatgtctacctccatctgccctctgataccgcctcaaactgggataaaagagtggatcccagtttggcccctgacaacgctacacgaaataatgcagaaaagggttgcaaccttggaacaactaactgccccacttggattttctactaagcctatctaggaaataggcagcattatcattaaacaaagaaatgagtttgctactaagcctatttaggaaatgtttgcctttgtaggtagagcttcagtatttatactcttcacttctggcgtttcctctcgaaaattttcttcctctcactatcccaactcatctcttctcaactcttctcaactctcctcttcactcctggcgtttcagcttaagatttttcttcatctactcatcgtaactcaaacgcaactcaactcagcttggctcattaagctagcttaactcatctcaactcaacttgtccttcgtgtggcttgtctaagatgacaccattcaaagttgcgaagaaaagaacgccaactaaacaaagaatgaaagatgccatgctcgacctccacagcaagacacaaaaactatccttcacccagctgaaggcctatattgaaaaccttacatcaatctttgaggaaggccagtttgagcgaccaacgatcgcaatctcttccctgaatatcggcgacgtccaagttttactcaagctcactcattcattggacaaccttgagttctgtaacagaactccggttgaactgtcccccgtctgcggtacgtatcccttaaggaatgttcaagtcaatgtaacacataactgatttgaccaagctgaatggatggacatgacgagagacgcgtttggcaaaagtggacccaatgaagcgttaacccggatcactctcaacaacctcctcatcttcgcccatcattttgtcacctcgcaacctagcaccacttcctcagacatgaacatgaacgacttgaacttgaatgccgaaggcctctggcgttatggccccgtcatgcataaggacaccaagcacgaccttgttgggcgccctgactatagcctgtggtacggcaatgaagaggatgtggctgtcagtgttgttgtggttgaaacgaagggagttgaatctgtgacaagcggggtctctcaaactctcggctacatgggttgcgttcacagacgtcgaaaagacctccagaagaaagatgcaactgtgtatggtgttgtgtctgatggccagtgttggtggttcttgaagattaacaatgactcggaggtgagtaaattataccatgaaatcatacatattctaacttgaatagtggtcagagtatatcattactgcccgtcacggaaattatcaggaggtggtaggaatacttgtgcatatgttccgaactgctgcgaccatgtctcccgctcagtcagagggaacatcacttcagacccactcaaaggaggcgtctgctgaatcatatatggagtttgatgaggaggcggtggaagatgacgatgaggaagaattctgattgctctgttctgtcctgtccctgttcttttctgcttcttttttttttttattcttataccctgattccctcgaacaaaagtttttttattttctccatatggattccctttgtatcctgattccgcatgatcatattcaatcggctacacgagtgttgcagaaagtagccatacccgatctctagggcctcaccgagttcttcaggtcctggccagacactaaggtcctttgaggagtcgttcgagtattgcgcttcaccgaatcttgtccttttttttccttgccccgttcgcactatgcgccgatcaaccttttaaatattggtgaggttagggcgggcagtattagggtgttcaaacttatgcaccgtcactgtatatcaatggtatatcttggcattagagtccgagaaccaattgaagagtgtaggtagtgacaccagtttcgggacgcaatataactgttctaacttctcagggattattcgtgaacatttcatggatagatacaatacagatgaagatctaatagagaaaacactgtatgtgttgatggacgcgaagagaaagagagagggggagcgtgcaggcaaactatccgggttctagttatcttatactcttggttgaagacgtattgcggaactaaggggtctaatgaatgggttttcaactctctgtatttctgtatcggctccgctggcaatttatagttaactagttagtatctagtactatccaatagaaaccatgcgatccttatagaatctcaagacgctcctggagtgctttcgggatattctgttcggagaacatattttagctggtaaagaaattcaaagaaaatcatggcagagtaagagaagcgcctcggggcttgactatttgtatttttttaggactgacattggtttggagtgagttggcccctatcacctcaagggtgagaattgtcaccccgttctcacctctctcaccccagtctcaagacttctcacccatatcacccgaactcaccctagagtgccgcttaggtgctgagggcacattgatcatcacattcgtgggagaggtagatagagtgagagatttaggttgtataaatggctgagtacaacaatgataggcagggtgagaattgggtgagcgccgctttatggtcacacgacgggggtaaaaaggtgtgctatagacagaataagaatctgggtgagaacccggtgacaatcgccctactaattgcggagcgaagcgaagcaattataaatcagaaggtcgtacgtaccccggagcgagatttatgctggaatatacataccgcctataagaatggtacaaagatgaaagaattaatcactttataattctctccgactattccgacgggtggcaaatatattcctattttttagataatgtggctagatatcgagctaacataggcttgtaggggtcgctgtccttcatgcaagcaaatattttcttgtacttttcctccgcttccagcataatgcgctcctcatcgtcaaatctgttatcatctggatccttccaataaagcgttcgatcgttattatctgcccagtcatccactacctttccatttggaataggagtagcaatgccttcaaggatcttcaatgatttggaatccctttcgcgcgatagtcgttcaagttgagcatccacatctagatcagactctaggacagacgacttgaaaccatgcggcccctctccccgtccataaacacacagagattcgagattgggaggtaaatgatcaattagattgaaggattgaggcctgatccgaccatcggggaatcgatcccggctggatcctacaccccgcgcaagatagcatagagtgtggacaccgagactgagactcttgagtttcgggaaatctttcaatgagatacaggatggtggaacttctagcttgtgagtggctagatcacgaagctcatctgcgtattgttcttcataaaatttctgttcatcctcatcgagcccttcgttctcatccagctggtaattcgtatcataaaactcttgccaattcgtacaagattccatgtcaagatccagtacctctagggtatgtcgatgaaaccaaagggactgaagtaatggcaccacgcttagtatagtaatacccccttccgggtcctttcgcccatctacggtgaaagtgaagctctttagtgtttttgacgactcaatgattcgacaaagatcatattcctgcatcaaggagtgtgtgaagctaatcttgctgtaattggcgcagtgcggtggaagtggtagtcctgcgttgttatcccacgatgctaatttgaaagtgacggactcaatagctggcagttttcgtaccacgtttaggcgatcgtagtatggatcttccacatatgtcgtgccctggtttcgagcatcatctgggtggaagttgatctccttgagattttggcagtatggaactgagccgggtgctgctttagaagctcgctggagaagtgacttgagcatgttttgagggaattctatgggatacatagatagggattcaaggttgggggcatttgcggctagcatcataataagcgcatctctgaactcgattgctttcggataagagggagacctatttcagagtaagtcatataacattaagagacgtgcatggagggaaaataattacctaaagtagagcggatcttgccaaaggatggataggatagattctctatcctggactttttctacgccggccttcttgagggcctgcttgagtctgtggatatcctccggagaaaacgatcgttgaggaacgggctcggattcgtagggagaaaagccggagcccgtttcactcccatacaagactaggcgacgaagatagcctccgagagaggggttggccaagatttcaagcagcatgttctgaccagcctgcagctgaactgtaaaactctcctgtccttctcgaccaagctgaaattcatgatatttttggcgattggagacatcgctgatactatgcagtcctcgattttggtgcgacaaggccacaacatcccccatagtagggagactgttgataattttgacgagcacttcaggaggaagattttgtaacggcattcttcgtgatgtgagacttctcctgggaaaaaaatgcgactgaaaaaagcggaacatgtgtaaatagttgtagaggaaagaaactgtcaaggaatactccgtaatgatacatggtattcatacccgaatatcaggtgaccgcatgtaagtacatactagctatgaagccttggcgctctattagggcttgcaactgaccgcatatcttttgatttattcatagtggcaatgagtttcatctagagagactgataaagtatgagcgacaagtagaaaattacggttccaggccagttcgtactaacgcacactctcatttctcaaatctccatgctttcaaaaagaaatggaacagttttaggtatcaaacaagcatcttgctccatgttataataaatttaaaattttaatagtcatcatcgatctctcaggatctttaggggttatcaacttcggcacctcgatgctttgggcatttatcgttagctcctcgatggccttgcgacaatggcgctatttgctgtggaaacgcctgcgtaggccagcggagcaaccatcaacttctgtagagcacactgttgggtcaacctggctgcggtgcggtagtagtcatgatcaaatactttccagatggcaggtggggattccgattttcctcactgcaatagttacatattattagttggtttacttagaatgttgtagtcatagaagactcggtctaaattttcaggctttgtgagtcaggacatgggcccagggggatcgacctggatcctcgaaacaagattcaagacaagattcaagatttcatcgttatattaagttagaaaatatctagggtgcacatttatggctaaatctcaaaagaagggaactctgagcctggaagcgccactagttgcggtggttgaagtagcctcagaggcagcccgagccggtgtggtggatgtcatcgagttcatcgatgcagtcggcgttgagggtgttgaatcggccattttggtgctaattgggctggttgaagatgaaatatcaacgacatcggtctttgtcgaacttgcgctcgtgctagcggagcttgcatcacttccgccatcgccgcattgaaccacagtctcccatccaccggcaaaggtttcctcccagtacgatgattggttaccaagaacaaagtagctgaagaaatatccagagccaggttgcttgtgtgcgttttggtagaacttgattgcacactcgtcgctacatgggaagtcttctctagcccagtcgtcactagcgggataagtcaagaagcagtaatcagacctgcgagaatatcaacatatgcatataccgtaaggaaaccacaatgtatcgaactcacccacttttggcacaagcttggccgtatttgtactggaaaacctcgcccactgtggcaacgggagcctcgtaaatcaaattattgccgctggcaagtccagctaggtcgccatccttgctgcacgcagcattaacattcttgatgtactgcgacaatgaaacactgcatgtcgctgtgcacatagcttccaaatcggaagattgcgggtcaaagtcaggatccatagacgccacgatcttgagtagagtttcatcgcagttgatactggcgctgtaggcctctttgcaagcctgtgatgttgtctttgccaagtccttggttgtatagtcccaactaggaccggcagtatcgagactgaaggtagcagtcgcctgacccaaagcagcggcaaacgcgaagaggcataacatgatgctggtggggtatcgttttgttaagaattccaaagagcaataaaaacagatgaaaggtgagaaatgaggtgcgtctccggcgacagaaagaatagactccgtgcgaaagtgaactggggtgttcgcagcctataaatacccagaattttcaacacttcaacagctattagcgaacttagttaactatggagctgctattacaaaagtagatagccccaaattttcaggggcgattccgaaatttaagccgcaagacccacagcgaaaagatcggatggggccatagatgaggccaaactgatgtttttgatgtttttttgagctgtgcaggactaagaatacgtatcacttctaggatatacagtattcccaggtgtgcacggtgaagtaggtaaactcgctgtcgattcggtctcatgtcacgtaatggcggaaattaaaatctccacatcgagatgcttagttagtctcattttcttaccaatcagatgtcctcgattccatcccttcctctatcgcagcgatttgattgatcatccgaaactgcctgacagtagtgctgcagcctaggggactggcactgatcagaacagtggaaagacagcatctgggaccgggtacgtcgggtccgttaataggcagcccttgtccagctttttagaagtatcgaaatctgtccaaggaagaatatgaaacgcctttttattagagaacatgagtttccagtggctgtaaagacagagagattattgcaaggaaatgatattactataattttttattcagagttattcagagtacgttgaagagaatatgctgtctacataactatgacgaaatatataagtgaagggcgggcgcccaatccatgctgaattgattttgcttagcaaaagcccagctaggtctcatgggctgttctccagatatctttatcactcagcttcagcttacaaattaacggaggcttctcccataataagtaagaacgctgtttgtcccattccccgcttttctcatgaagtttcaagtcaaagctccaaagaacccgtgcaagaaccactcgtgactcgctatatgctagttctctcccgatgcagttccttggtcccactgagaacggctggaggatgtctcgattgtcgttgtagaaaggcgaggataggtcatctctggcatcctctagccaacgctcgggcataaacttgtctggagcataaaagttcatgggtgactgatatgcggcatattgatggaccgatactttcgtctgctaaacatcagccattgttcggtggaaagaaaacaggaatatcaattgaattacggtgcttacatttcggggcacgacgtagcccgaaatattggttggtccaggcccaagcgttatccgctgctgtccagagagcgctggtggataaattcgcaatgcctccttgagacatgcgagcatgtatggcagatttgcggtgcttgagattgtgatatgcttctcggtcttcatagcagatcttatttcacgagtgagtttttccatggcgtgtggcgttcgcagcagccagtaagtaattccagaaagtaaagtagctgtcgtctcgctgccaccaatgaccaagacattagagttcgcttctaactcctcctcggtaatctcgttgtttgaatctccgcgttgccgcagcatgctgtcaatgaaatctgtgcattctctgtcaccctgaaattggagacgtttctggatagtggctctgctaaattcgatttgtcttttccgtgcactcatcaggcttttcgaatcaacaaagagagacaatattctgaacaaaaacggataggcatcgttgaagctcacaagggacatgcctcggattgcctgaaagatggtcgatacccagtaatgatatttagaagattccaatcctccaaatggctcgccaaaggcgagatctccaagtatgtcgaaagtggtcaagttgtaccattttaccatatcggcttccggaatgggcgaggcggcaatgattctcaacttttcaatcaagagatccacatacttcgtgattatgggctcctgggattgcaggcctttcgcagaaaaggcatgtgccaaggacctgcgaagacgactatgatctgcatcgttggcgctaataatgtcggacggattactggttgaatgcagcacctttggtagttgtcgatggccatgaccatatatgtctttccatgcctgagcggtgatgaaagagacttcgtttgggccaaaacgaacgacttcaccgtatctttcgtgaaaatctcgcattttggtttccaatcgaccctgggaaagggcaataaaacgagtgataggaaaggcaacccatattttcggaccggggaggttgctaagtggatggaaatagagcgtccgaatgatatttaagaggaaaatgcagaaaaagagtatagcaaggaggaaaatggttgtcaacatgatttcgacggcttgttgccttcaggctcctggtattgttcacaataacagaagactcaagaaaagaagaatatatatttgtgtcctaaagttcgagatacaggatatatcaatatatatggataactaaggtcatctttatttcaacctctataacaaattgccatacgattgatagaaccctcttggtatgttgtgcagaacggagccgcctggcatcggatccgacgatcatcggagccgcaggaaccgcattgaccaatgaaagtacgtgactccacctatgtcttcggcttaattctcatccaagccctatatcctacagaaataaatatacaacatttctgggagtatcgcctatactctgaaatgtccactctaccgacgctcgtcttcatacctggcgcctggcataaacctacatgctacaacaaggtcatcaagctcctccaagaccagcataagttgaaatgcatctccataactctgccttcgacgacgggaaacccagctgcaaccttcaaagatgatcttgatgctgcacgtgaagctgttttgtccgagacagtccacagtcgcaatgtcgtcgtcgttgcgcactcctatggcggcatggttggcaatagtgccatcaagggtctcacgcagccagacttcaccgaaacccaaaatcaaatctcgacaacgggctatgttattggcctaattctcatagcctctggatttaccctaagtggacttgccttcatggatccgtttttcggccatccccctccatcctggcgggtcaacaatgagaccggatatgccgaacttgtcacttctccgcgtgagctcttctatcacgacttgccagcagacgaggcagaattctgggtttcgcaacttactacgcaaagcctcaaagcactgttcgagggcggggaatacacatacgccggttggagagatgtacctgtttggtatattggcaccgtcgaggaccgaggtttgccggtagtggtacaacgcataaatattggcatggcaaaggaaattggtggcagggtggagcatagggagcttcaaacgagtcattcgccctttctgagtcaaccagaaatgacggtcatgatcatgctagaggctgttgaggcgtttacggggaagctaggggtaaatcaagctacagaaaatggcctttgcgatgcgatagtagcgccgagggccatgatcacgcagcctttcacatggttcagctttggactcccgctggttattggtcatatattaggaaggtgtatacttgtatttacttgggggaggagattctggaggtctacttaggtagaatcaattaatgtatttttggtatcagctcaacggatgttcaacaaaaagttcaaggctttctgttaggttttgatatacccgttagaagtagcgatggtgacaaaatgataacaagatggaaagttcattgaatactacctcttccgacgatctattgaaaacggtccaggggatatctaccgcttgttataacgcagttcttcggcataaaagacattgtcagattaagcggaccatagaactatcagcaattggaatcattgctagcgggtattgcctacattatgcctatttaagaattgaagctgtatctaggacacctgtgcatcccccaagcctcttttaagctctcacccgtgcgggtgtcgggaggcttttgttgggctctttgaagaaggaggagtcgaaaaagttcatttctcgtatggacccatcgagcatattctctgccatagagaactttgacattatggccgatgagagttccccagggacttcgggatgatatttgagcacctgaatatccacttgtgactacgtagtcgtgtgatatgccaggaattcaccctttgactgtgccgccaagctgatttcgttcatgtctatacaaagatacctaggcactacatgtatttcctcaatcaaactcgtatttgtgaatgtaatagttatcttataaggaatgttacgcgtaccgaaagaaagaaataatctagtatgcttccatatcataaaaaaagtaaatgaacagttctaacagttctagcagtcaatagaaattaacattggaagaggaaagtactgactaccttgtgtattgtaatagtcgaccgtaatatatcaactagcatcattggtctagtggtagaattcgtcgttgccatcgacgaggcccgtgttcgattcacggatgatgcactataatttttttattttttatacaaaaataagtacacctcaccgttcgtagaagcatcctaagctggacaatatgtagctcaatgaagcgaaagctgttcaagattttacttgacagtttggtggttgggtttttggaaaacacagaccaattagatacttcccgttttagagggatggatccttattaggattagcccactgtgacagtagtgaaatcgctgtaacaatagtgctctccgacttgatatattacaataatcctcggtggattttttcgaatagagatgagcctacagaatatgagactcgaggaactctcctgatttaatgcctttctacctaagtttggacaatctgcccggcttcaagtggatgggcccaggctttctatctatctctacttaggctagcgacatcttcctgactttgacactctgcggtgcatttgaaggcgatcatgttgcctttccgagagagatcagcctcttgtggtattctcagctccccgttaagccttggtcacatatcccagccctgtggagcaacttttctcgattttgcccgcggggttcctccgtccccgggggctaggtcagtcattccctccctgagaagacttgtcctctgcggtatcaccttctgtcaagctcgaggggcttcgggtcctcggattcggagggggacagggacaatgcacggtgcaatcgattgcgaaagcgcagtcgtcgatcagcggagggaaattttggaatggcactcataattgcatgtaggtacactgagatgacaagcgaccatatggcgagcacactcagcctttatgcaaagtcggtacaggaaaccagaagtgagcgctctgccagctcgcaaccgggtgttgcaagcttcactgtcttccacctggccctgccgcaattgtcgctaaagttgaatatgtttcaaccactcaggcacacagcggtcaccaacttagtgtggcccgcccaataaatgatatgcgctagggctttggcagaagaagtctcttgtactgatcaaggcaatttcgagaatgactgtaccatccgaagcatactgacgtattttgaggagccgcctgtcaacaaagaatctgcgcgccatagtgttggcggatttgatgctttcaactattccatgctagaaaaatgacggatccgtcaaattctgaaatattgatgggtccaagtgatcaaagctgaaattgtcgtcatccaaaaaaccgaggccaacgtcgaaggctgtaggagtgcacattatttcctcatgcctccaagcctcggcatcactgtcgccgccattattgcttagatctgtcgacatgttgcccagaatggtctcacaatcattcaggctttcgagcgcagcattttccatagcctgttcgaccggtaaaccatcaagcatagcctcagctcgagccgttgctatcctcagaaacaaataccctttcacatttgtttctccttggcacatccggtcctttgcatacctaacaacccgatgagcatctttaagtaatggctcttgtcgggcgcgatttcttctcttggccagaattgaaatatccgactcatgacttttgtgcaattccaggtatatcatcaatgcaccacgtgtgatgatgtcccgaaacataccacccccattgaccagcaaccggctatagagatcataatcgaggagcgatatcaaatccagggcaacctcaagacaaactttatgtgagtgtgcatagagtgggtttcgtgtcgcctgtatcgcgtagttgaagtgaagacaaagaagaaaccgattcaggagatgactacaaaagctatatgcaaattggcttcccaacgatatatgctcctcagagagattgtgagagatctcaaccgcagctttgcgacagatcgaagccagctcatttccaaggtctaaaaccaaatgatacgagggttcttcctgtaagctgttgatgaccctggtggccctaagtctgagagagaaagaactggccaacacgcacagaagcggctgccgagtcgagctcgtagctatagtttcccggtcttcgctcactgcagaatctaggtcggcatcttctattccagatggcggcatagtgttgtaatcgctctcggtaatcatcggggccatccccgagtccaatgccgcctgaagattcatctcaaggatggtataccataatcttctccgaatctctttttgtcggaagtccatatcacccagatagttgggatcctgatgtaggcccatctgcatggccatcctcattagtgatcccgcggagacccagactaagtctgctcctattcggtttacctggcgggaaaggagtaataagcaatatatctgaatgccttttaatgtcaagcggtctttctccaacggtgcggagagccatgtttgggcaatattgatccaagaaatactcttttcggccaactcacggcgagtttcaccatgactgtgcaacggaccagcggcggaaattatgagaaggagctccacaacgaaggagctctttgcgctttccggatgatcgatatagcgttcatagtccgcctggaacgaagagcgatgaagaatgcggtagcatgactcaaatgttgcaaagtacagttgaacgagatcgtctatgacttgacgttcggggaatgagcggtgaatttcagcgggaaggctctgtctgtttgggcgctgcttcttgatttcccgggccagttctttacattttgccatcttctgcgacataagcccccggttcgcatcgatcggttgttgaaacagcgtagtctgatatgccatgactggccctagaatggacaattcggtggccttgggtgggctgtcaacaaggggccgaccatacggaacaggaagagaccatcacttaccaggcgctttgtactcatccaatggccctgtccaaaaactcgagtcttagattgggtgccatggattcggccagacggagcaggggtaggtggggagatattgctagagggggatccgtcaggtattatcgacgttctgtgttcctgctgcttggtggcttgactttcgcgcaaattatggtcggatgtgatgcgtcggttatctgtaaacgtgcatgacggggcgttatgcgcgacacactggctgcaagggttggctcggtcgcatcggaccttgcgacggcgacactcgacgcaagaatgagccgggcgccggcgttttcggatgccactttctggacttttcgttgacaattgcattttgcagatgctattggtcccacttctactggtatttttcgtgtataagttaggataagaactcgcgaactcggtgaactgcgcgtagtgaagtggctcggtgctaaatctataatccgatatctccgacgccaagacttaggtggggccctggcttagaactagccaattgtagtagatagaaggcatcggtatacagaagggtgggagatctgtagtaggggaaacagggcttacatttagaatcaggagagaaatcactcattgacattgcatatgaagatgtttcgaaagctgcataaagatgacatttgcaattctctcgctccatgcagcttcagtgatcttcacataccgactagctctaattcataccccatgtggctcgggaaacaatgtcctatcgaattgcgtagaaacaagaggtgcgctagacacaagtacttttagcttatcatgggcgagggaatgccctgtgatgctatccacttcagtgaaataatcctcggccgtaaggctagaatttaccgatgaggccgatagagccgattacgcccgccggtcgactacaatgataattactggcagggtaccttctcggttgatagcgtagaatataaataatcagctagttattttcatcagtaccagatcataagttatcttctctgatttaaccacctgcaatcttgcagccgcagcagcaaggaaatacccccccccgatgtttctccagtacgtaaatgcgtctttccctctcttttttttacaaattccttcaagggctgctgaaacagctagatgcatatggcatcctcgctcggcttcagaaaatgtaccccttcatgcaggcagtcacttacacattatcagggcgtcgaaacgcaacctgagcagtagacgcctcccagctctgcaatcaacaacaatgcccctcaacgtcctcatcgtgggtgccggcgtctgcggcccagctctcgcaattcttctccaaaggtctaattccaaacacaacatcacggtcgtcgagcgttctccctctttgcggtcgataggacagcaaattgacctgaagactcaagctcctcatatattgagaaagatgggcctcctggatgaagtcaagtcacgctgtgtgaacgagactggttttgaaatggtggattccacgggaaagcaaattgctttgtttggtgctgctgcctccggtcaacgtcgtcccgggttgacaagcgagcacgagatcatgcgtggtgatttggtgcgagtgctatatgatgccagtatcaagcaagatgcagagctaaagcatgagtcgggaaatgggaagggagtgacatatgtattcgacaaaacgatcacagccctcgacgagaccacggaaggtgtcgatgtcactttctctggtgggcagaaaaaacgatatgacctcgttgttgctgccgacggacaaggttcgcgcaccagacgtctcgcctttgggcaggaggttagcgatgcagctttcaagtccctcggcgtccacgctgcctactacagcatcccacgaattgaaggcgaaggatctctcgcaaggggccacttggctccgggaagaagaatgatgataaccagaacgagtgatcgtccagtcaccggggtgttactcttcaccatgaaagaatcgtccaggctaaaagcatcttaccagaagtcgttagaggaacagaaagaagcttttgccgagatgttcagggatgccgactggcagactgatcgattgctcactggattgaaggcttctgaggacttttatgccaatgaggttggacaaatcaagatggaacagctgtctgctggccgagtcgttctccttggagatgcgggttactgccccagtccttttacgggcttgggaaccaatctttgccttgttggggcgtatgtccttgcaggagaattggcgcggcggggcaatgacatcgctggggcactcaaatcttatgaagagaagatgcgaccctttataaatgattgtcagcgattctcatctacaaccttcggcttcttctttccatcttcgcagctcggagtttggtctatgcaaagagtgatgtgggcagtgtctaaaatcaatgacatctttccccattcccaacaagacgactattggaaaaatatcccggagtatcccgaattgaatctcgcatcttgattgtatcttccacgtcagggatatgtcgatgtatttctaatctttttgtcttcattcttactgccctgcaatatatgcactcattcatatgttgcttaaccacctgctcaagatctgccatgttgaatttggtcgcccattccctgtcaatcgtgaactgggtcattccatcctagacccgaccattgcgaaggcttcaattagaacctggttttgacgcaataaattgtaaagcattaagttcatatcttacagttacgatattgaaggcctctatggcagaaaacaggtcaatggtcgttacagagattcattccagatcagtagatctataccggtccacgttgacgatgatgaacccgcatttaggggctaaatgcattcttagccgggggttatgtgatgatccaggaaggaacgtacttgctgaactgacactcgcacttgccgcacctacactctcgctccttccacaagtagcattgggaataagcgagaagaactcgacttttgcatcttttgcaaatttgaaaaggggaggaacggccgcacagatagtttctcttttcctttcttctcctgtacttagaatttggatgaaattgcactcttttcctctggatagatctggcatgtaacagatactatctaccatctagcattgaaatgcagtttttagaattaaattatctctcttattggtagtggtagaattaatatgaatagctttatgtttaacagatcaggttatcagatcattgtactttcggagaggagattttggtttcttgaagtggtcggaggcaaagacaattttcattgactgcattcagcaggaattcattcaatgtacgattccgaggtatctgattccggtaagcaaagactggcttttattgacaaattccccgcgaatttggagcaggttcaatggctcagttgccattgggaatgcattacatcatgtcaaatactttcaaatgaccgagaatttctaacttcgaatcaggtgtggatcatcaattattgcggagcttgttgacactcagatattgacaggtaggttttgtgcggtagagtaggtatgttcgccgacttgcgtaattttctctcctggcgggatactggctctcaaatcaagagtgatataataactcaatctctagctcacgatacattaacttgctttatcgtacaggtggcccgaatgccaacgcagtaaaaggtacctaatatgcagccgataatgccatgccatccatgcattttcatcataccaagaacccggacatttacacctccatccattctttctcgttctcgtcggcaatactctcccggtatggatgtttctcaatccattcctctgcaccgacaactgtcgcagacttctcatagaactcgctaagcacctcgttcagctctataaatcattaatactcgtccaatccattcccgtgtcttgttttaagactcactttcaatttccatcgggcttgaaggttgcagtgaaaagcgagacgcgccttctctccatagtaccagcgcggacgggatgggagtacctaaaattataagctttcaaacaagattgaacatggaaaacagcatacctcgtgggacgcagataacagtggggtccaaacgacatttcccgtcggtgacttcttcctggtaccgctcaaaatcaaagcgtagcatttgctgcataagacgagagttcggcatgaagaccggcccattggagtctaataggtagatggtaagactctattgcacaagtgctagacaggagtttacagacaggggcttgacttcgcgatagtcgcgtgaaccaacccatccttagacacgctgactgcatccttcctgtggcgggtctcgtcctgggtcacatcatatagtgtggccttgcgatttagctggtatctatacatggtcgcggggaatgaagcatgggtggaaaggagggagaattttcgcgcttggttgatgttcagccgggcagctggtagccagtgagtggcgagcatggttgctagagtgtgttgcaaggtaatggatgttaagttaaaggggcgaaattcttaagtggtgtgtgtggtgtgcggttaaattaacctccagatatcgcggaaattggaccgcggatggggaaaggaacacgggtccatgacatgacgcaatacttacatatgacgtcgaggtttaagaggatctttctgcaggtgagctctacgtagcccgatatatttctataaaacatctatctgaatatctataaactctcgcatgaaaagatccgaaatattaacatgggatgcgaattgcttcacacgcttctgtagatttggaacttctagaaataacgcgccgtattgtaatgaaagtcacatgatcgggaatgcagtaatttactacgaacatccgacactcaacgattacatacttgttccaggagataattctaccatttgaatttcgatatcctccgtggaattgcttttgaactacggagtactccgcatatatctcaagtctctccacagctcattcacccataacccattcccgcacaagccgctattttatgattctcttccacttcaagtttgatacatacgaccatagggtgtggaaaacagggcttcccgtccgctcagccgtacttannnnnnnnnnnnnnnnnnnnnnnnnnnnnnnnnnnnnnnnnnnnnnnnnnnnnnnnnnnnnnnnnnnnnnnnnnnnnnnnnnnnnnnnnnnnnnnnnnnnnnnnnnnnnnnnnnnnnnnnnnnnnnnnnnnnnnnnncgccggtgagttagtagttgggtgggtgaccaccagcgaatcctcactgttgtatgtttttggctttgtttttgccacataatctattttctttacacggcgattctcaatatgcccttgacatctgagcggcactcgagggtgagcgcggggtgatgggtgagaagtctagggactagggtgagagaagcgggaatattgtgatgacgaccgtgccacaactctcaaaatgctttatagtctcctcggcgacagttttgcgcagagggtatgtactgcccatggtcgcggctgcaacgcaaaaaaagagagcaggcccttggtccctgaggcgcgcggctgtcttgtcgtgtgcaatatatatgaaaaggaacttgggcaccaagtcaagatggaatgtcgtaaccaagcgttcagcctcggcgtcacttaaaagctctcactggatcgaggccattggacgggtcactagcagcatctagcagtgcggcaatgtccgtcgagttcagttcggaatcacgagaccaacccgggtcgttggcgagcggattgggctgcccattatgtcgggtcaaatcagccagctgtgatgccagctggtcaaccttctgacaattggcactgtggagattgaatctggtaacagatcaagaggtcgtcaatacggataatattattgtagccaatggaaaaaataattctagtgcaggagaacatcacgatgtcaagttttcaattcttggatgccaacagtgtgcgttcgtgagatgatacttcaagtcatccgtgatatgaaatatggtctgatcgatatgttctttaagctagttggtcaactgcacgagatgaagcgacagggattgcccctccttctcaccacctccagccatgttctccaaattcgacatcctttgccatggtaggaaggtattcatcgtctttcggggagtctaggaccaggaaaaacatcacgaagtaggagtccttccatttcatctctggggggatacgggcagcgcttctgaaaccggagattttactatacgttattagcttgagatcataagagatatagtcgaacatacacagcacctgtcttcatatcgagtatgatctttgacggggacgccggaaccggttgatatccaacctttagaacgtccctaattctagttagcggcaagtacatgataatcaacccactgagtaacaaacatataggcctttcggaggtttgcacggacgacatctcgtttcccgcgggagagattccagaacttctgaatatcaagaggatcccctgcgaccttttcccatacaaggtagaggatatacccgccggggacaaggtcggtttcttcctgcgtgctggcatgatatccaaggagtttaggggtagtagtaaagttattcgctgtgaaatactttaaggcagatagctccacgtagtcgcgtgatttccaggcctgtgccttccgatcgtccgagctatcaagttcagtaccagataggggaacctgtttgtagatacgcatgaaggcgatatcctcggtacctgaacggcgacaaagatattttcccgcgacatatgccggatgcatgccaatgttgaaatccttctgggtaaccggaactgatgcctcactcaacttttctaatatgcgccagcggctagtgggatagagagtagcgcattgtttatccgaagggttcgggcatgctgtagtgatcaattcgttgatcatcttgggaagaactggacgagcttcgatttcaggcatcgtgagcttggaaaagagagatggtgtcaagaggctaggagaagaaatggcgatgcggcagtattatactttcacttctggggaaaagaagaagagggtagtaaacattaacccgtggactagttggtcgccatacgtcatgtgatccaaacacccgacgaggtattgtgacaccattgtgcataattggatagttgtatgggagatagagaccgagattgaaactacctataagacacatcgtgaatgcattctgcgcattaatttcaaattcacattaattcgttcaaggttaacctttttttccgtattttcccgtatttttctcatgtctacctagaagataactatacaaaaaagcacattaaaagactaccatcaagccaactgggtcatatgacaggctgcaaaagtggccgactatccttgtgttcgtgaatcaaaaagcaggaaacctaaaaccatacagcatagggcagcaagaaagaggttaagtgtagttagggccattttgaatttacgtgaaaggtactatctgcggttcatctcaaaccaaaagaggacctccagctagataaaaactagctgcagaatgcccccacgatcatatcatgtagcggataagtcattcattatagtaggtagtagggtggctgaaggcgtatgttctgggattgggtgcttcaatgtcactaatcatggtgaccatcacgccggtgaatattgataacgaggttagtactagttgttatttagttttcctcggcagataaaacagttattgttgagactgataggacctgctccctaccttgtttggtcttccttctctctctcttagcgagcacacacaatacaacacattgttctctttctcatcagttatccgggtcgtgtagcagttgtagtatctcgtctaggtgacaggggtaacctaggagccactgtttgtttgtagaatcctagaggtataatacccaatggtcaatgatatggttaatgatatgagtgttaaaggtgcctatagctactgcctgatttcccttcaacttctctttccattccgccttgctcttcttctctgactcttttaatacgccgagctcttaagcctccccttccttccattgtttccctcattcagctatctgcgcatgacgaagctttttttgcactctagattgccataatctaccattttcactttcaattttcttctcatctcagatgtgagtcttactcaagagccatttgattagtatactaataagaatccccttttagtaccatctcaacatgaaatctcccacgattacaacgcaggaggcagtcgaaagttgtctccctgaccttctcaaggctactcacaaaaccttatcatccgcaatacacaaagtcaaatatattggcccgctatctcaatggcaggacttcgaggaagatgtcaagaataacaaccccaaacgttggacctcggctgttattgattatcgtatcagcaaccgcgatcttcggcaagaggaagtctatgttgccgacgagacaggtgttcaaggaaggttccaacaggctgtaggtcaagttctcggagctgtctttagggcggaaaagaagaatctccgctttggggactttaagtctgctggcattacctacgacaaaaccccggatattgctatggtgtctcccggatccccagtcatgcttcgagctgtcggcgagctcaaagtcccctgggtcatggctcacaacctgaggaaacggtacggcgccgatcaagaactgcgtttagcacttggacaagtgctcgaatatatgattgacctacgacttccttatggatttcattctacctatgaagaaaccatctttttgaggcacgtccaggttaacggacagtggagggtcgaatactcacccgtgattcagagcacggcgactgatgtttcactaaagaagtgtttttggcacctatcatcgctggcactccaagggaatcctgttcaaaaccccgctttgaaggatgacttggtcactgacgaaattctttgatttagtcctataagccaattctgcttaatcctctttcttccttgctcctttgtctctctatgcttggtatcttattgaaatgcactctttgggaactatgagctttctctcaggatattgttgaaagtaaagttgctaaagattgaccagtaattcaagtttcacctgattttcctatgtcgttgaccctgtcaggtgccaagggacctcacaagtcttggcttttggtcggcccgtgggatccgggccgagggtggacctcaaccctggaaagccctgcatgtgtgcatacgtggggcttcggcttccttgagtcggacttcttatcgcagggcaaaggaattaaagggggattatgaagattgcgacgttcacaccgcggataagctttggccgttgcagcacgttcggaggacaaggacaagactggctatgtatacgataacgagcctcaatgtccccgtagatacctccgttcaacgaatcatttggacaagggatttggttgaagaacatccgagggtttggccccacttcctgagctaaataaggaaaggcttgatgcttcgctcgcttcccaggctgaaacattttcaaatcccagattcccacgaaattcttgtctttaacacagcaccggccaataaatctggtcccttggctactcccggcagctgcagttaccccgaggacaatgaggttcaaaggtgccgggcatatggccatagtggcgttgcgcattctactgtttacaaatcaagtcttggcgctcaacctggatgttaacaatcagcgtaagataactatgttttcatatctttctaacggttgagttgctaattacatatattttcaatgagtagaatccatcaaagatgccgggagcaccgccgcctacaacatgatgacatggtacaaagaaaatgggacagataacccgggtttcatctcaagatcttggtggacaggagctgctttgtttctagcatgtctcaattattggcatgctacaaacgacacaacctacaacgatgaagtcagcatcggattacaacatcaggggggttctggcggagactacatgccttcatgggcagtaggcatagtaagtgtctctctcaagatatgtagtcaaagtgctaaccgttgcatagggaaatgatgatcaaatgttctggggcctcgcggcgatcaccgcagcagaatataaattcccgaatcgtccaagtggggacacctggctcacccttgcagagggcgttttcaatgaccagatatcgccagaagggaagggatgggagacgactatttgtggaggtggccttcgctggcagaaggagatatggcaaagtggttataccatgaagaacgcggtgtcgaacggtggctttttcatgctcgcggctcgtctcgcttggtatacccaaaagaacaactacgccacgtgggctgcgaaagtctacgactggtctacgacggtgaatttggtcaataataaaacctgggcagtggcagatagtgtcagagcaggctctgggggtcccaatggctgcagtcttcctgaccacaccgagtggacctacaactatggtacctatatatctggtgctggctatatgtatgcctacgtaagtatttttatcccccaccctttagtaaatcagaactacactcctgtcttggcatgctaataacaaacctcgttgtagacaaacgatactaaatggcttaatatcacaaacaacctagtggattcattgtttactacatttttcctacctcaacacggaggtgtgattacagactgggagtgcgaagcttcggacgaatgctacaaagatgcgaatggtccacttttcaaaggccttactgtgtcgtggcttgcagatgttgcattgatcgtccctttcctcagggagaagatcctacccaaactccaagtttctgcccagggtgctgcaaattcatgcaccggcaacaaccaaaacctctgtggtaaccgctggtacggcgggtatgatgggcaaaattcaatggagaatgcaatgagtggtagtcagataatgagtgctgttatgctgcaatttctaggcacatcctcaaaaccagtctcgacagcaacaggagggaacggcacaagcgacccgagtgctggtactggggaaaggtcggggcctgcaccgttgtcgcctatcacaacggcagatagagcaggagcaggaatcctgacagtgcttttcgtggctcttatgttaggcggagtggtctttttgtttatggacccctgatcctcctgggatgatattctagcaactaatcaagaagcgaagcttacgggccgacttatatttcaagttctcacaataaattttttctttccgtgatctattgacgccggacagttaagaaatatcgagataaatgatcacgggatcgagtagacggcagtgagaaacttatatttcccgagaaagtatctatattctacagtctactataaaatataccaactactacatactagatatttatgtatcagttcaactggttgaattcaagcccggaggctgacgaagattttggaaatattcacattcgccggtcggagcggatacaaaacttccccagacttcttctcctcctcgaatgttgtcgtgtgaaactgcgcgatgatagttcccctgaacggcgccggtggtttcgaccacaccttttccacaaccttggaaacactctcgatttggataccccggaacccttcagtcgccgagcgtctcatcatttcttccgccaacatcctcataagcccacggccggaataagattggacggtgttggtagcgttgcgcatcagtacctgtccgcgaccagtaggcctccacgatgcaggatcccgctggtctcgctcctcgagggcgtggtatagtgtttcgaacatgggcagtgttgctatcagaggctttatctgaaccatgtctagatcgtcgatgccatcgtaagccatagcaattgagactagtgggaagtccatctactctgcaaggtccctttccgttgcactttcatcatccagattccagtacagcttgccccccgtggctgcagacgcgggtcgcttgtattggtattctttgtcgaagataccaagtgacttccctgagtcaatctggtgttttattaaatagtacgaagtctaaaggtttgataggctcgctgggtgttgttctcgggatagacgaccggccacaacggggagtggaatatatttatatgaatgcaaattgcccgggcccattcctcatgttctggcccaagaaggcgaatttcgtactgcggcgccagagatagggtcattttgatcaaattaccaagctgagaatacgtgcatcagatgtgggaaagaggggctattaatacccgggtttctagctgcagtgtaaccattgtcatttcagtacagggagctagctaggtagctacgtgttacaggtatctgatgcgtgggatagtgccccaaattgcttcccgggtaccattgacttggcctgtgtttcctatgacacagcatggactcctcgcacgttattttgacgagttggattctctgtagaaaatatgggaatcggcttttgatgcaagggattactatcgctcgctacaagaagggaccagtcctaacctcatccaaattaggaatgtagaatgtatagcgacggaaaaataaacgcctataatgcactataccttgaaaacatcatggtccttcggtggcccatcaccacatccattaatatcacatatcccatatcccatatatatctccttcactcttcctcgttcacaagttcgccctgaactctccgttccggacgcggaccagcatttcatatctgcgtctcggtactcaacacccggttgaataaaacgcagagtagaatgcaccaatgttggacaaagcagtccactctctctaggagcaaggactagcaaaagccagaacaataaagcgtaaagaaaaagtgcagaaacggcccaccaactctccggctcaggagtcaacaccagtgtcgacaataagcacccgaagcacgttcattgtgcacacctcttcgaatggaaaaaaagaacaggaaacaacacaccaaacccctccaaaattatcatggcgcagccatatacccgttctcactctcgctttcactctcatttccccccaagtcactcaagtcccgactccgatggccagaatcagaccaccgcctcgcaccaggcaagacagcagatatactgcctgttgagtgcttttcacaagtataaccaaccaggacagtcttttcctgtacttcatgaccgcgctgtccataagcagagcatgggtcgatcgagtgctcgaagtagaggcatttgcaaacggagtaacgttcgacgactttgtaacacatttcgcgtatggtatattggatgggatttggggtgggttgaggttggatgatgactgtggttgttctgggttgtttttgagagccgaaagagaagaagaagcgaaccagccgattgaatgaatagaagaaaaatataacagaaaataaagcggacaagtatagaaagataggctggcggaagaatgacccgaaaggaaatccgagggagtgactgggttgaaagactgaggggggtatatagaggaactgggggttatatatttagcgagtatagacctgatatattcacacataatgcaataacatataaaataatataaaataacatacaaaaccatatcccgagggtcagccctatgggatgtagccccaggcagaaaccaacggggcgcgcccaatcggctaataaggaggaggaattgggaattgttactccactacgtagacaggtactggctatggacgcgggtctacctgtgtctgcataggtcgggtttagcaacgtatccattttacccctctatgctgtacatagcgggtgactatggaggatagtgggggtgcgatacacaataaaagaccagtccagtcctatcccctcagctggaatgttcacactctgactccgtaaatctcactatcgcgacacggaaatagtaaccgcagcagtcaaggatctacaagtgtggcagggaagcgaaagacggtggacacatagggaagataaccccgcgacggagtcggtgagccacaaggctgcgcagccgcataacagcgagcaaatagaattgacactggatgaggaatcagagatcgcgatatgactggctgcgtggcgtcgatcataaatccaatgtgcccaggtggacatccgggcgttttgagtcagagcctcttgacacagccaccccgtcacaggtctaggagtgtggcttaggtatagagccgccgttgaccgcatatcgatgactaggtctctatacgattagttacactctattctattacaaactgtcgcattcaaacggtgacattttgtagcgtgtagattaggcgcccgcattcagctgctgacgctaacacgaacacgaacagagttgacggagtacggagtaccgaggggaattcgcgagaaccggttttttttagctcgacgctaatcaccacggacacgttgcatgatatacctcgtgggttatccgtcagaggccgtagggctgagggcccgagcccccgagcccacttgccgttttgggtcggaggtccaggagattgtgttgttttacgtgatatcgtagattatatcgtagatacgctcatatagagaaggtactggctcaagaatcaagtcgcatggttctgatatcgtacagcgcctgtcataaagacaaagtccctgaagtagatgtgtgtgtgtgcaaatgtgctaagctaaattgatttcccggattaaaaaacacccattttcaaaactaggcctccctcttactctaactccgtaatttcagattgatcccattgcgccgtgactcaacccgcgtgctaatcccagccgaaggatctggaggatatccccacccttagcggtctcgggaagcccggcgcgccaatcccatccgcgatcggcgctggctttgtcacctggcgtaggcactaggacgccggagctgcccacggagggagggtgggatcctgagcccgagcgtgcccgcgctgactcgagcatgtcgttgccaatgaaggcaaagctggaggcggagaaattggacacggacttcttcaatagcgcgcgcggggaggggggtccatctaatcctccgcgcattgacgattggtattcgagtagggtggaccggaaacattcctcgcactgtgcgtagacacggggggtgacggtttccaggtcctcgattgcggacaggatggtgaactgttgggatacggacaggattgcggtgggttctggcgccagattagtatcggggaagaaggttgacggggttaacttggaagacttacggttcacaaatgcacaggcttcacccagcagagccagcagtccatccacctgcacggcggagtcacggtccgggtcgtagagacctccgtaaatattatccgccgcactcctaatgacagccgcaagagcttgtgcagcggcgcgtcgccgagccaaaggcttgtagcgtggtcgctggccctcttgcagttcgaattcctcatcgcggatctcatagaaccggcgcaacgtcgcgtaaccactgaggtagaactggagaatccgagcagcttcttcatcgatttgtgcaatggatgacaggcacgctttgggttccttcatcaaagagcgcagttgttcatcgagatcggccgtcgcagggtacgcgcgtgattgaaccagactataggaaatcaataggtcgacaaccgatttgaccttgcgtcggctctgggcacgagcatagcagacgagggctagaccgaaattttcagattttgaggtcaacatgtcgccgaatcgctgtcaataagttagcagttggtcagtcaaaaggagttcccttctatcactcacctcagatacccgacgcccttgatcctccagctcaagttccgagcagagaaccactagtttatctaactgctcagggctttccaaaggaagcttatccacgatctcggtcacggcctgcttcatctggtttgcatcgtccatgcggctcaatacctcaatagccagctcccagccttcacgggaactgtgctcatcctcaataacggttcggtcatacagtccgaatgcgtaactgcgaagaatatcgtccttgcgcaaatggcgggccggagacttgttatcctgcccgtacgaaagaaccataagatcattttcagacagcccaggaatcgtcttttggctgcttgcggactcaaaccaacctcctaggctggcaacttcggccacagctgcggccacgcaaagtgaccatgactgtaccaactctaacacgccctgcacatttccttcgaagacagatgcgagaccgacttccacgctgctgagcggattgggtcggaaatcagcggtgtcggacccatcactggtggtgtgactgagggctagttcgaggcggtcgagataggcgccacgcatgttgcgatcaacagcgcgaacgtggttctttgggccacgcgagcgcaggaaatcttggaagttgtcgctagcgccaaaatccatgttggaaccggtgtcatcctcgccatcccaccatgctgtcaacgcaatagtcgcctccacccagtcttgagacttggccttgatggcagatgggtcgcccagaataattcggtagatagatctcaagctctggtaaattgaccatgggacacggctctctgccatgcgagccgattgagcaaatgagattgggttcttattagcagtatttgagttgaaagtggacaagccaaagttaacagcctggaagcgattctctggaaccggcataatcgattcatctcgctcctctccctcagcgaattcctccagatcagtgacagccgaaagaactcgtttccggtactgagaccaatcaagaccggtgacttcccagtcttcagcttgggttccaggacatgattcaagaatttgaagagctttgttaacgcaacgctggatgttttgcagctgtgcgccacggtagccaggctgtggaagtccatcctccattgctgaccgggcgtagttgaagtctgcggaacggagaacacctgcggcatcagtcaagcgactacgcagcacggaagcaatgataatatcccagaagttcgaggatgcggtcgggttcggttccacatatttcaatgcttggagctccttggtctgcgatacgtggttgtcactgagccagtcaagcaaaacctgtggtagaggcttagggacggggagtctcgtcatggctttcaccatgccaggggccccggtgcgcatgggattgatgtgggcagtcgacgctgcttcacgagaagggtggtggatttggagcagcaacgaagccaagaaggtagcttttgcaaggtcggaagcctggtccccgggcccaataccagaatgggcaccgtatggccggtcaatcccactttcgttcgcgcaagtctgccaattatctgtcaactcctttgatatcttcgccaatacagcatcgaaatcgacatgcttgaattccgcggctttgagctcgtcggaaagttttcccagggcgtcctccgttttgagaatcatctcacttggctctttaacaaaggcaatgcgggatctggtagcaatattgtgaagaattgatggcatcgcggacggcttcttgggggccaggttggtcttgcggaggggagactggtgcgcccagtgctcgtcaagcttcggtcgcttggcatcgtttggattcgaatagatctgtttgcgctgcgcacccatggagggctgagacccgaaagggtttccgaaggccgagtctaagaagttgaagtttttggactgatcctgggtgttcatgttcatttcctcttcaattgcctcctctgcctctggttccatcccgtcttcctgctcttcatggaagtcactcatttgcgacgatgcaaacccattggaatgtccgaaatccagcgaatccccaaatccgccgttcggcacaccgaaacgaagactggagttacccttgaacctagcggaaggggctttggtctgcttgggcatggcataatccgtcgatccaaatgatgatccgaagatgctgtcatttgtattgatgttaccggatttggtaaagaccgagttggagaagtcatttctcgagaaggagttctggtttgtggagaatgcgccatcgtttcgggagaaggagttgatgcgcgagccaccgttgatgttggatgtagaatgaggtatgaatgagcctgcggtcgatggtggcgggccagcaggagttgtcgacaaattgctccaaagactgcgagagctatctttctctggagtctcaggtggactggactcgtagggtacttggaatgacatcgcggggtcgggttgatcagaatgagaagagacgggtcgacggcatcagaggatgcaagttttgggtcacaacagctctaagaactgttagatggaacaaacgacgataacaatcgacaaaaattgattctggaggcaatgaagaaggtcggcgcagttgattgtttgtcagaggagttccctcttctcgggacttgcttgtttttttttctcgcccttcactttctgcttcgacgcgacggcggaagttatgaggcatcaaggcatctatatttagatcaggtgattttactcgaagttaggtcacgtgaggtgcttactcagaccaaagcatgccatcacgtggctgtcggtcaccaacttggggcgataacatgattggcttattgctgagctctgattaggcagggatcagcaagtcaggtacgaagccacatctgatgcatctgattttgccccgggggttcgacgagcgacacttcatgaactcaagcttgcaaagatggatcccaatcatgcttagttcgaacaagaccaagcctttaattgatcagagaatctaggtgtataattaacacgctaaactcaggttcttggaaactagtcacatttccacggagtactccgtacggtaacactctcgactttcaagtgtctcaactttcaagtgtctcaactttcgagtgtctcaactttgaagtgtctcaggcgtctccggttcatcaaatccacatttatcgtgtgtccagccgccgagtatctcagtacccacagcttctagcgccacaactacaatctcagacaaactaaacaccttcatggcgctaactgctccttcacacttggaaagccggatattactttccaccgtaccccgactccagagggcccgtcgtgggaatgtggaagttccgacccttctccttaaactgtacgatccgtcttgggaccccgaacgatccaacaaatggatcgagaatacctgcacaaacaaggcttttcggagtatatattgatcccgcatgcagttcgacgacgggaggaagctgatttttgcctggcaaccaacactcgcttggcagcgaatatgaaaactagtcgagtagaccagactatagtgacggcttttgttctagcggcatctcttccaaaacaagcagcaatttgactatctatgcaaactaaggctgcggttctacctcatggcgctcatctcgggaattagcttttttgagaaggtcagctgtgcgaaacagagctcggcgggggtggggcgggcgttgcaggtgcggagaatcaggttgttcggacaagtttgaggtttaattgacggccccgtggcgttctggatattacataattacggatttacgaaaatcccggacggttcattttagtgttatttacctattatacccttgagcaactgctatattctctcacatttgtttaatttgttttcacgatagattgtactttgtacaaagtaggccaaatcaaatgttccaaatgcccgaagccaagcgaggcagtgcaagctgagacaatgtttcagattagacaagcctttttcgatggtttgatcgacagggttcggttactaagggatatcccgaggttcctcccgatgatatcgaatcctgttgcctacccccgaagaaaccaaccctaaaaacaacccgagagacctagagcctcatttttttctttctctcaagctatggccaatccaaaaattgcatgactatggcgttccgacgaccacatcggaaatctcgccacggctgcatggaatgcaagagacgccgagtcaaggtgagaaagaaaagagaagggcaaaaaatagtatactcatcccatcacagtgcgacgaaacccggccaatatgcaccaactgcaccaagcgtcattctgaatgtgagtacgggtcgtcaacctccctactgtgggcaaatgaagaccccacggcaccatctctcgggtccgacagcggacagtctggcgacccagtacggggactccgttcatcgttgagtccaagtgcaggagcgggaacagcagactccttcggagtcctaggccagcacggcagtgaaaatgccgcgatctcagcgggatccccactgaacctcaacgacctggagctgatgatgcagtggtgcaacacgacattccggacactgtcacgcaacgagcacaccgacccaatctggcgctacatcgtacccgaagaggcgctcttacatccattcctaatgcatggcatcctggccctgtcatcgctacatctcgctcgaacagggccggagctgacccgtcgcgcgtcatatctcaaccgtgctgtcgcgcaccagaaccaggcgctggcgctgtttcgggagctactgggcgacgtgaaggagagtaatgccaaggcgatgtttgcttttgcgggaattgtggttatctacacgtttgcattcccgcatacaccagacgtgcaggatccgtggtcctgcgtcgatgatttgtaccaggttctcgttttggcgcgcggcgtgcagcaggttatttatgcgccccgggactttaccagttttctagaggacagttccttcggtccgattttacaggccgaggagactcagggttcgatccccgaggacacgactgctatgctcaaacaactgcgtgaggctaatgaagtctgcggggcgcgggataaaaatcatgacgtgcaggtttataaagggtccattgcgaatctggaggaaatgcttagttggtgctacagcgggatgagggcaagtacgattgctgggaggtgggtgatccgcttgcatcctcggttcatggagttgctacgcgaacgagaccccttcgcgctagttatgctagcgcactatggcgtgcttttacaatatttgaagcatcgttggtgctttgacgagtggtgtgtcagggtctccaaggccgtgtgggcaatattggacgatcagtggaggccgctgatccagtgggcaatgaaagagattcttggtgttaactttccgcaacaggttggcacttgacattttgaagcatttttttgttactttcatattcatattcgtatacccaagttcaaagcgccgaaaccgcgagagaaatcccaccaatccaaaagaaaaacaatttggatctccacctgaatatctccacaattatcgcaacaaatcccgattctaacccattaaacgatgcttgagccttccatggccttcaacccacttataactatcacaactcttttcatcccacgaagatgattcacctcgctagggtgaatgatcacgaaaatgacgcaagcatcaacaattcatcaatgacataaattaaaggggaaatttttatgataaaaccatgcgtgcccagagcatattctacgacatgaatgacgaatcgcatgagagaacgatactggacgagtggatgaagcttacgccggtgaccattcttcccgcacctttgggagtgagcattgagaaagtcaattgatctgaaccaatcatgaaggagagacatgaggggaataagcataccagaagcctacctcgccgcgataaatatatccagctaacccaaattagggcaagctgctccccttggccataaaaataatccgggcctattccatgtagatactagctgaacagggtggcaataggcagcgatgtgatctgcgtaatatagcatggtacctacagtatccgccgactaacgggatcaagaattgtgttctcgtgcggaacaaatgaaatgtgtgcattagagcgataattgcaaagcggactaggagggatgctaatcctgaatttctccttagatctgcaacgagcaccaagcagtccttggaaacgcaaattcgtgttaggaaaggcgaattcgtatactccgtactccggtatccacttcggataagagttaagctttgtggcgttccgtatcaggactagcgggtatccactcgtctcatatgtatcgggacagcaatccgaagccctagagggatacctagcctgcagatctcgtgtgggtacggagtaaaatgtctcaattctttcatctaggaccataacctacaacttcgcctgctcactcttattttgcagcacataccgatatctcgcctttccctcatgcatatcaactagcgcctgattaacatccaccatatccctcttctgaatccaaggtaaaacccttttcttcgcagccagagtcagcatagcccgaatatcatcaggagaaccaatattggacccagtaaccttgacactcttctggataagactccaagccataagcggcggcaacgcatcctccggcgccccaatctgcacaaaagtcccatcccgcttaagcagtctcaaatactgcgcgaagggcatatcatgcgccgacaccgtacacaagataagatcaagcgagcgcgaatatttcttcgcccaccccttctcctcacccgtagcaataaacccatcagccccaaggccaccaacagcatccgccttcttccccgacgatcgcgaaatagcaacaacacgatccgccccaagcgccctagcaaacaaaatccccagatgtcccagccccccaaccccaacaatccccaccgtcttcccaggcccaaccccatacttcctcatcggcgcgaacacagtaacacccgcacacagcaacggcgccgcctcggccgagggcagagaatccggaatccggaatacgaaatgcgcaggcccgcgccacctctctgcaaacccgccatacgacttcgacttgtcgctgtagcgtccgttgtacgtgcctgtcatgcgggcgcagtagctttcttccccgtcagcgcaggcatcgcagtctgcgcgtagacaggcgccgctctgtgcgccgacgccgacgcggtcgcccagacggatcgcgttcgggcccgattgggatgagacggcgctgccgaggcgtgtgactgtgccgattatctcgtggccgacgacgcaggggtagtcagttggaccccagcctgagcgtagagtgtggacgtcgctgccgcagatgccgcagtgggatatagaaatttcgacgtcggtgggtgtgaagggcttgggggtgtaggttgtgtatgttagggggcttttggcgtcatgggcgacccagcctttgaaggtgtcttgatctgtaggaggggacattgtttggtggtagttgcgttgtggagaggtgtcgaggtaggtgttgtgctgaattttgatacgtttgatgtatgcgaaattagagttccagaatttatgaggttgaaggaaacaagctgatgcggagaagccgaagaaaaagttaccgaggtccatcttaactccgaagtagagatacattattaaattcatatcgattgtagcgattatgcgaaagttactccatatttacatgcactcgctcaaaatgtgtacaatgcagactagtgggggtatcaattgatctttcagcgagccacgcccatcagatcttcaagctcatcagtagtgagagtactccgacgccggttcgctggcctggaagccttttcaggtcggcttctctttcgtgattcgcgctccttttgctcatttttagctgcgcgggcctcgtcttcgacggcagccagtttttggtgcacgcttggtggttcgttggctttgggctgtagggcgaatcagtgctcggggtctcattgggaatcttatgggaatatcctgggaaatagttctcgttgcatacctgctggggttcctttgtctcgatctttcgcctggttggcctgcgggtcacagtatcggctttgtaagctttgatgttgagggtatcgtcgtcggtattatccacacatggtgagccgtgtaaacctggcgtgaatgagacctttcggggacgctttgtcatggtattttcactgcgttccctcagaacgcgatcgggtcgctcgggtgctttgcgaatcttagatcccatcttcagaggattgagcctctcaggctctggtgctttctcctccgcttcgctcatatcttcctcctcagcttggtcctccaggattgtcgggataggattggactctgccaagctttgcatgctcatgtcctcggttgagttaatgctgagatcgagattcatgccgcgcttcaattcgtccgcttggacagaatctcctccatctgcaagacgtcgctgccacccacccatcatggtaactgcctgcttccaccgggattccatcttcacccagccttcccgcagtcgtttaatttcctcgtctctcacctcgacctcctcaagaggcacgaatgaggggttggtaagcagcgtttgtagatgctctagcactgcttccatgtgaccggatagttcttcacacgaggttggaagcgaagtaaccggtcctgaagaagacttctgcgctcctccgctcatcgccatacccaattgctcattctcgccattgccattgtcagtctccgtcaagccctgtagatccttcaaagtatgaacagtgttccgcgcaagctcaatcagggtatcgttctcatcactgaggtgttgacataactcggtcaagaagtcggtggtctcttgcttcaagctatatccagggtcatgtactcgttctccgccactagccagaagacgcgatcgatctgaggcagggttgatattgatcgtagtcacactcagaccctcacgcttgcctctttgtctctcagccagatgcgacttaagcttctgcatttccagatctcgcttgcgaatatcgtttgcgcattgcgctcgaacttgttggacggtactcttcatgcgctggacttgttccttgaaacttcggatgttcgcttcggcccgggacatgttggacttgagcgtgcgctcctgtgcctctgccagagctagcgagcgggtcaactcggatgtcttcgtttttagttttccctgtaggagcagcaaaggttagcgcgctatgctacagaagtagagtggagacatacgatctccgtggtctgctccgcctcgctggcttgcaacgtgcgaatagtcgcagataagctctcgcggtgttcggactcgcgctagtatttgtcagtcgcggatgaaggcgcagctcagtgcaatacacgcacgtctcgtctcaacactaaatcgttgaccaaattgatcacacgagccatggtgccgtctatccctccatcttcgtgttctgggtcagcaaaatcgatggcacgaccacctttcagcaagccccttgctagcaggatgttgttgacataggtcgaagctgcctgcaggttatgcgactccatggcagcgatcacttctattgtcgatgcagataactccgaatgccgaatggggaagaaagtaaacacgtaaatacgggaggctgtttgtgccaagtgtgcagctacttatgcggtgaggaaggaggtgtgattctgccagttcatcgtggaattgtatcgcgacgcgtcaagacttccaatttcattggatatttcctcaagtattccgataaagaggtaatccaattggacataaccatttatcgaaagtctgaagaggcagccctcaatccaggagcaattgaatgatatgctaatggtagtatcgtgccatctttattacatgacgcgtgggtataggccattgtccaatctccatgtcctatttgtcccttgcgtggcattaaactcgctcctaccccactacttaatcctcaccaaccgcctttgcatctgctcttcaacatggcttcaaggtcaggtacgcgtatggtacgcggagtaatatcaaaaaagaagcctgacatagagcaagccgctgctcttcaacgtgccggccaaaatgcatacaaagttggtgatctccaaggcgccattgagtccttcacccaggtatgccctaccttgtttgttccgtcgcgactcctactaatttatcatccatacatctaggcatgggtggcaaataacgaggatactagtatcctggataatcgtgccgccacctattgcaagctaaagcagtacagccaagcccgcgctgatgcgagagcaatggtcaagcttgcaccgaatgacgaccgtgtatctatccaccacagcgcttatttatcaactgtggattcatggctgactttgggaaaagggatacctgcgattggccaagatactatgcctagatgggaactttgacaaggcccgtgacatctacgaatatgccctccagaaacttccaaccgatcaccctggccgcaaggtatgcttttctttcttcactttttgttctactcagccctggaggtttactcctttagttatatctcattgacatcttcccccaccgtatcatgtcccactctttctttaccgttattaaccatctccaggccatcgagcagttacttagaagactgcaggataagctggcaggagggaaccggcgcgacccatttatggtcctgccactagaaatcgcagaactcacacttcagcgcttgcctttcaaacagattgtgtaagtgtacatccttacctctgaaatccactagctcattacggcatatagggcaatgctacgtgtctgcaaaggatggaaccgttttctgagcggtctagccagcttatggatgcatcttgacctcactggagctagacttcgtgtaccttggacatccgtccgaaactacatccatcgatcgcgcgcgcaactgactaatgccacgatcacaaatatcccaccctctactatgactaaggtgcttgatatgctaagcagatgcccccaattagagcacttggaggtggcggttccccatgaccagcctaaacagttttactcgaaaatccaagattttcgacatctcaagagtatcgtctgtggggcagacatcaggctttcgcatgcaagtgttgggggcattctatctaccctctcgaaacttgagagagctgcttttttgcatgtttgggatcattctaacagaggaccccagacatggccccagcatcttccaaatatgaaaagtctgactattgcatcttcacaagaaaataatcaatttttgagcttccgggatgtacttccggggttgggattggtaggcattctctgaatttaatatctgggacttccgctgacataaatcagtctgtgtatcccaatctagaggaattgcggctggtctgggatcccgcgcgatcacaatcataccggtttgatccggtgaaggaggaagaacaacttcccccgctccgcatacttgatcttcggggcgcggcggtccaacataatttctattcaatccttccaaccagccttgagactctacggttgttttcagggtccatcgaggcttctcatcttggtgggaatctgttgacaccgggagagaatgaactcccgaatctaaagaccttggtattcaatgataccccatgggtcaaccgctccaccctttccttattcctactccattcgaaggctcccctccgaactcttcacgtcaacctttgccacaacatcaaaagcgaagaactccttaatgtgctcaacgattccaacggagcgaatccagaattgaaagaattgactgacgtcggagttgcctgcatggcgggcatggacgataccagtgtcaaaagtctgtgggtaacattgccaaacctgaaaatcctcgacttgtcgcagacgagaattaccggctgtaccattcgcatgtttgcggatacctggactgaaggaccagccaccgcaaagctcgaaggcttaattataaaaggatgtgacgatgtgtctcgggatgcaattgactatggacggcaaatgggactcaagattgtcacttaggggcttggcagcgctctaaggatacttatcttagggcttttggtagacaattgtctaatgcactacccttgtaaaatgatcagaaataaccaaagatacctgcgcttgtatgaaaatgatgaatgatatgaatataaacttgctctcagaacttggaggtggagatagtgtcgagaggctaggggatcagagggcaaatgcatgggaaaataagaagagagaaacaagctggcagtcctggaaaacacatcatgtgatagcagcatacggtggcatatgtatgtacgcatgctaggtcttcaaacaaatcaaagagtgcatcaattcaaactaactaagacggagagaaagaagaagcaagtgcagaagtgggagagtgcctgcctatataactggcacttctgcaaacgtcgcaaacaacaaacgttttgaaagaataaaggaaacagcaaacgtgaggcaagcaagtaaaaaaataagcatgtgatgctatagaggatcgtaacacgcataatggccgggtaataataccaagggtacctgaaatccagaactaagaaaaccatctaaaccccacgttcctgacaccaccgctcaacctctttggccaacttctccttttgatcacgcacaagctccatcatgggctcaacctgcttcctgtgcgaggcaacaagatcctcactaccattgagagtaactacaccatccttcggcgcaagattctcgtcatagattttgaccataagctccataacagctgaaagctggtttggaagccactaaaaccccaaagcaatcagcatgatgatactcataagtcagagaaatcggacttgactcacggttacaataggactaccaccagtagcggtaggatgcggtgtgcgacgaataatatactcacgcgcgaacaaccagtgtcgccagcggaaactgcggatgtggttgagtgtgcgcaggaagaggactgcggtctcggagtcttgaatggcgtagttttggacgccgatttcttcggacttttcgcggatgtaggttaggaattcgcggtgtgggagagggcgataggcgcggaattcgtggaggattttggtgaggggtgtttcgggcatgggaatttcgcagagatgatctaggagggggatctggggttgtattagttgggttattcttttttccctctcttgggttccattggattgcttacgatgctatcatttgcaccgctctcaccgcggaagtagaggggcttgttgccttcacatccttcgtagatcacgccattcgggaacatggattggttggtgatgccgaagatgaagacgcggaaggagaggtattctgatggcttggaattgccccacatgtctatttcgatgtcagtttggaagatctggggatgtgtttcgtatggttagggttgcataccttccatggacgcttcgattttctccatcgactttaggatctcgcggaatccgtcgttgatatcctgtcgggagccatgctgctcaagattatccacaatctttaagacaccggcaatcagtgggccagtctccttgaccatgtcgacatgagtcaggatgaagcctgcttcggagctcttgggatcgagacccctctcgaaagaccgaatcagacgaaggttcgagtactcgctcagacccttggcagggtcggcaaaggtatagttgaatagagcatatgaagcagcatatgacatgaaaggtggcaggttcaggctatggataattgttagttccagtgttgtatgacgaagatatatcaaaataatccacgagatagggcagtaagaaaagaaagataagaagaaagaagacttacatctcagcacagcgatacataggacgggcaatagactggggcaatacatcgcgaccaagtccatagccacctgctgggtctttgttccagtgctcccagcaaggttcgagcaggtaagacgaagccaggaaggtatagtcacggaagaccgcagcaatagtgaagcgatcaggcgaaccatcagcgacaacgagcttctcgacctcgtcagtcaaatcagtaagctcagccttgacagcagggccgagctcataggtagccaacaggccgggcttgccatcgagcctaacgacagggaggcgattgactagagacagcagggcaccgaaggcctctggcagctcaacaggggcagtctcatagggcaagaagcctgtcttggtggtgatggtgaaggggtccagggagtgggagatggacgaagggtcatcatggatgtgagggaaccgcctcagggtagttggggaagggtagggcacttgggttcgagtcatgatgatatgagatgaaccagagaaaggagaagactagaaggctatgatatatgggtgtagtaacaaagggtgttttggggtagtatagggaagggtgtagatatataagccaaaggacaaaggagaaggcccaaagaccaagtcaagagcctaggtagtgggtgaaatgggtaaaaaaagtcggggaagaagctagaagacctcgagagatgaaaagagaattggaactttgagattttgggcgggcgaggagcagattcttataatactttgaggccggtaacaattccggcctcaagccctcattacgaaagagaatagaagatagcgtggacctggtgacatcaggtgcaacatgatgaaaattggttctatctatcctaaataacactcgagacagttcatatgagtatttttagccagaataagatattttcacatccatctcgacatccagatgaactatacaattacccagttagagagggcagaggacggtcacggggtggcgctagtcccgatacagcaggggctctaacagccggtttgactgctttacctgggatttaacggagatttgtgatgggaaattccaaataaggtgtttaaaaagtctataaaaaagatattggccattcactgatgaattactacagatgaatggccaatgttgtctacttaagtcgtgatgtatactctatagtccatggactgccaagcggagatccccatatcccgctctctgattggacgataagcccagatttaacttccctagcgttcggaggccggaatactaccggcctccgagagtagccggcctcgttatatgtgccgggttgatttgatataggacaggctcataaattagtatgataccttgtggtgattcccgagataaagcgaagattgacttataaacagctccatctctctaaaaatcttattatcttgttatttgaggaagaagtcgcacttagtatatctctaaatatattagaaacaaacaaaagaacctatcgtacatttgcatcccaaaagtaccgaaagtacttgatctattcagtgactctctagtattatatatttattgtataccacgcgattagatatgaatgatctccgttgttgataatctcacgatccgtcgttcccttctataatcttcatacaaatgcacgctcagtcctattcaccaccaaagtccaagaattgtgatagaaagtcccatgcaactgcggcaaaaaatactgcaagaccgcatcccctacaccagctggcagcgacctcttgtcaccccaatagtgcctcaccaactccccgacacatcccgtagctgcgacccctgggcacccatttgcctctgcacaagataggactcgaatgtcctccgatctgttaaattcatacctgacgtggttcccaaatgcagattgctcatgtggccattctcggccccatttagcgcagtctggatagcgcgtttcagtgggacaatcgtcccacgcctcaaagagttcatgggtgcgagggctttgctgggcaataataaatccagtgttgagaaatgtccggccgttccaatcaaggttgtgaggtgcttctggatcgagcgccatggcaaccagagtctccggagtgatctcccagtagttgaatagccattccatgggtagattggggtacggcatcatggcgtctgaatccatgaatacaacgtattcgtagtgttccaacgcttctttgatggcggtgactttgatccatgttccacttcgcccgactgctctggggatctgaactagtcggtaatcgtagccatggatcattgctatgctagtcaatcacaccgtaggaacagatagaagtgtgactacttaccgaacatgtaatggttgagtcttccactgacatccggaggaagtccagtcgcgttcaatggaaccttgctcaaaagaccttgagggccatcaagatcccgactatcggcgtccaaaatgaggatcttctttcctaatggttcggtgaaccttaatggctccgcaacccagaaggctttccctgtgcggccaataaatatggttctagtaatggggtgtatgtagggattgtatagtttgcggaccgtggaggagtataagtggctttcgacggtccataggaagtgcttcctatactagagtcagtcctcaacttcaacattttgctttgcgtgggctcgtactgggacggctgatcgattaatacactgttcaagtaggagtataccaaaagcagcgcacacacgatcagactcgaagtaaaaatagcggttattcggcgaggaaacatgagtcctgaccttggacgaggcatggggatggtacatttccggagtttccgatctgtagatttgacatagtatggatggaagtcgattgaaatgacataatttcgatgaagtaggacttatctcacccaattcatccatttgagtcctcacctcttgccgctttttgcttggagggactaagcacgcctttttctgatctggtccttattttcgtactatgccattgaacaaaaagttctccgaatatatttccagggttccgacgctgctttttctgaattctaatttttttgaccaaatttgccgtctctttagttcgcagttccatttaaacggtagaaatcgatgaaagtacagcgcagctcctaatcccttagttgtccaagcgaaggtcccatttgaatcagacataatgtctccataccccttcgtgataccgtatggtccgtatcggaaccttggaaaccgggccgaaattgcggggggtcaagtggtatatcatattcctaaggctttccgtcttttttttctcagtttcctcatgtccgcagaatcatccaaatgttgcgtcgcatgtggttggacgctcgagcagcaagaaaattgcgcttattcgagccaccttaaactcttttatggcgccggcaagcggggaacatggtcgattgggtctgatgttattttgaaagaacgccccgatgaaggtccaaaaaccgaagtgaccaccttgaagcaccttgcagcctaccccgatatcccggttccaaagatattgcgtgactgggtcgacggcaacgggcagtactttgtacttctagagcggatccaaggtcaaacgctcgaacaggcctggtcttcgttatcagatacccagaaaatagccatcgcagatgaatgtattggaattcgaaagcagttacgattagtcagcacctatagaaaatgttgatcaaactccttgttttccgggcctactgttttttgacagtgagccgcatggacctttccactctgacatcgagctttgggatgccccaagtcttactctacacgatccacctacaaggtcgttccctcaacgagccctagcaaatctgaaggaacggctgcccaaatgtgaaccctacgtcctcacccattgtgatctcaatttgggcaatattatggtgaaagacggaaggctggctgggatactcgattgggaatttgctgcatattacccaatttggtatgagtacgtttcagcctcttgggggtggacagaggaggatgcccagtggaaaaagcttttacgagagcgtatggctgtacatggcgatgaacatgaggatgcgaaggaattctggacggatttgcatcatttgagaaaatacccagatttggacgaaaaaaggccaagaagttttagaaaggttgtctgcggattaacgacaatgtataggaaaacgaaggtccggggggattaagccggcaagagaatttactaaaatcgatctagatttcaaaccatcctatccaatgagacgacctttcaaacaagctcatacaagtatacctcccacatcccatgaggatcttcaaaaaaagttatgtcatcccgatcaagccattaagatcctggagcagctgttgtaccagctccatattatctgatttctcacgcaatgccttcttgagtgcaccggctgcctccttggtatttccaggcactacctcctcagactgcagtttcttctctgcagacttgatactttccttcgcacttcgaatctgagaccaatacactgaggtcttgttgagatatccagtctcctcaagaggcaagttccacttttcaggagtcatttcgacaatatccaaccatttggccatgtgcggccatcggcgctcctccagacccgggaagtgcacgagcagatcccctcttttgccttcataggcccagtcccattcataggtattgatccacggtcgtggcagataggagactccatctgcgtaaccctgtccacttggaccccccgtcgttttgttgagcacacgtctcatgctttcttggtcagcagatcgaccaaggtcaatctgagggagataaagagggtagcccaatgtttcggtaaggaaactgatcatccagggatggacgtggaggaacataatccccgtgttgaggccgttttggtcctggcttgccactaggtggatatctttcaggtcggacggcgggaggaagatttccacggggatgtcattgttcagtataatcgagtctgcgtctacccacctgcgcgaattagcattctcaagcatatacaaagaaagaaaggacatacatcaaccactccattctctcgccggctggcttggtcaattcattgacaaccaaggatagcagatagctcggtttgttccaaaatccgatcgagatatcctgccgcaggatatgcatggggtatccccattgcttcccatggcgttcatggctttgtagcgctctttcgtacatatggttcgtctctccgtatagcatggacactttggcgaccctttgcaacttgttactgggagcattttccgactcgagaatagaaaaggaattgactgaattggctgtgacccaaacaacacatgttactgatagaattatcaggacgatgtgcaagggtcgttgtttgaatgccagttggtgtggaatcatagccgtcatcaccgcgtaggtgctaggcttgttcctcattgtgggtgtgggtgggaagatgaaaaataaatgcttccttgaggttcagccgggaccattgccagattcggaattgaatgcttgattggaggctcgtgagttgtatgaattcgtacttccggattgggaattccgttttcggtaactcaggtacaccccgtctataccgacgaataatgtccaattaatttagtttataaatagatatcgatccaatcatttgaagacaaagctcgcttattctaggacgcatggaaatgcgctgtgttgcgtacggatacttacggtccactgcccacatggtgcgtatgaagcccacaaaggtgtgccggtgtatattgatgataagaagcgatgtcgccgatctcatgagaacattcctgcgactgaccgcagcacctgatagattacataagaacatttaagcgtctaactaactagttagactacatggcaccggagtattgtagaccataatcacaacagaacgttcgattattgtcgctacagcggtgtatatattacaggccttaaggtccgttcgagattataagagaaccaagatcgcttggaaactacagcattaactacaagataccgtccagacgacgcccaaactggtagagagacgatttcatgttatatgatacagatgagggtatattatacaccacattttcaaatatttgtacaacagcgcatattcatacaactttaactccacgttcccatgcatcagcgacctggccgtcattggattcattgtatagcccgagcgcatccagtccgaatcgcagactagatcccgcaaacgaacgcagcacaatatacacagtcatatctacactatgaccctggactcgtgttctgactagttgtttttgagtcgccggtggtgctgtgtaccgtctggagcttgagatactcctgttcgagggccttttgcatttcaaagtcggcctggcgttctagtcggacacgctgcttttccatatcacgttcgactcctctgtgcatagcctagcatccaacaacgtaagtatataccagaaacagggaagagaagctgtaacataccgctctatccgcctcttgtgcccagtggacaaaccagacaatacccattgtgccgaggccagtggctgccaatgtaaactttgatgcgcgagacattgcaggatatgtgagagcacggctcgacgcagagattcggctggtaatggtcacaaacaatgttttggcctgtcagatgttcatcaaaacgattccgggattatcagatcaccgggcggcgtttggtggcagaacccccaccgctctggggggcgatgcgtggctccgatcgacctaggctcggagctacagactcgccgtttaatcgtccctgtcctgccttatttcccttctaccctatttccaaagctgagaggtttctagcaaatatggtgagcaatctgtctcagaattggtggccagctgctaacggtgaacaacagtcggctcagaactccgcgggcattcagaccctcctcgatgtaggtcttcgttgtatgttgagcgcatcgtggagatactaaccatgggactgctaggccgagagagaggcccagaagattgtgcagaaaggtaagtgtcttacccctcatcgctgcctatcacaaacactaatacgtcacgttacatttagccagagagtgtacgcaatacaaacttacctgtcgtcattcgcaccatcgaactaatgatttcgcaactctacagaccgtacccagcgtataagggatgccaagtcagaggcccagaaggagatcgaagaatacaagaagcagaaggaagaggagtacaagaagttcgagaccgaggtgagatacaattcctaaatggcggtcataacaagaggcatccacagtgctaatttgactggtctcactagcactcaagcggatacaaggtagccgaggccgaggccgacaaggaaggcgaggtcaagctccaggagatcaaggaagccggcaagaagcacggcgagaaagtggtcgcaaatctcattcgtgtgacgaccgacgtcaagcccgaggtgcctgagaatatcaaggcataatgtagatactctcggttatcttttctttcgtcgcgtgaatgcgcttgcgtgtctgttcatcgatatccaattgtcggacaatatcaatttctttttggcttaaccctgtgtatgatgtggatggattctggatcgctcgttttggaatacgcatgtcgtattcctatcccatggtgtccctgaaattttggcttgactctaggcttttcggttgacagcacgtctaggtttcaccacaacacagagagctatgcctaggcaaacagctcaccagtatactaagccatacaacacaccttgatattcgtatctgtattacgggacggcaacaagaggcgcagggtgactcaatgcgctgtccaaacgtctggacaggtatcagcactcatccctgttgaatggatccttgagcgacgagttactgctggtaacacattctggcactagtggcactgttggttttaaggagtgtctgtcccaatatcagaatagtgtataattagcgtttgagatttgtctcttaggccttgaaatgtttgattatattctgaattattccggcgcgaaaagaggcctatcctaatgaatcaagccctgaatttctagctgataacacatatctttctctttacataggtacatatataggctacgctcttggtggaagaacacactggtgaatagtattaaacagtgggaaatggcgggtgggaagccgaagtaggaagtaggtgtcgaccagaaatgaacccattagaccccctaatatcaccttggtttttgttatgcggacacttcgatccggcagatcagtaactcagtaacttcgcttaacttcagggtgagtacggtcttgtacagtcttcgaatagatcgatccttacatctctagttgatttctataaatctggcatccatacgtagctagtaaatagtgatgatttcaaattttaaatttaatcaatacaatatctctttgtagttgaaagatcattaagagtaaattaaaagtattccgatcaaacattgatctatattaattgaaccatggacgaggctgttgattttatagagagagtatctaagtactgaccaataacgtattttactaccgagtgggccaccactagcgagtaggccacccatccaaaacgcgtcgattaatttaaacccttcttcttctgtcagaatctaggatgaataccgtcatttttcatccctgatacaattgggtcacgtgactgaccaggctggttttccgcccgaaaaacatcctttcattttgttttgtttgtttgattactaagttgtccatcagattgtcatgttttccggactattgtcatttttagagagttagagaattgattgagatttttctgccacatatacattcgccttaccaccgtttttccgtcaggttcatatataggtcaatgccgttatagttatccaaccatcacttgcgtaataaggccatatccctagggctgaccgtaagagggctcaggtgatcaacaagacgtccaacgagactacattagtatatgaagagcgatatcatttaaaatagcagtgatattaggcgatttttaggatctactacgcaacacagaacaagcgcttttcgacacgcctctccactatattgacatagtatccgaacaacattggcgtcgaggccatcctattgagttttgcattccattccaagtgacagcctgtgtcgggatttaatttttccatttctacgctctggcggaacttagtgggccttgggaacgaatgagcatgctgaaccacgaatgcttttgctcgcagtgtgcagcaatcctatcccacacctggaggctctcttcccgacgcgcgcaccttcctccaaggtaaccgaattactaccttactacccaccctgtgattttgaaaccttatcccctcctacttttcttgctgtatcttcacagtttctctctctctcaatttccgcagaacctgtgacgaatcttatgtggtgatgtttgatgcctgtgttgatgcctgctgccgcaggcatcctttatgtatttagatcgtctctcattctctcacacactctctctgctgttgcggccaacctgcagaagcaaacacgacttttccgtatgttaatttgccttatttgaattaccgatacattccctcctgaacaaccccccgccccgccccttcccccctaagaccaaatccaaattccttttcaatatcctctcaaccacaaagccattctcagaaagcatctctcagagccccaccacaagaaccgccctgtatgaaaccgcgcacaacccacaccttcccgcccggcgcgaggaaccactgcatggtgcgcgcgaggttcttctgctgcgagcgaaactctccgctactatgatctgggtaaacgagcccttgtattgctgtgtgaaggagtcggtcagttcgcccttatgcgtgggggtgggcggagatcttggtgcttggtgctcggttgcagaggttgtagtccatgttgaacgctattgcgcctgagagggcgggcgaggggcggtctgttgccacgacggtggatgctttggctagggcgcagattagggaggggagagcggcgtctacattgtatcaagtgtgagcctgacgatcaaggattctggagggatttgtatactagtacgaaagatagtagtaactcatcagcgcccagctcaagcacactctcacccttgacactctacgtctcgtgaatcctctttccacgcattcgtcttaggactcatctgagtactggaatcggcatcttccacacctcggcgacaaccatcgtcgcgctgcaaagcagatgggcgaataacttccgccccacctccaacttattcagcccatctgtcttctccaacccggctgcagtctcctcggtgcgcttctaggcctggcctgggtaggttgggaccatgatttcgagatctccatagcgcggggacgagtagaggtgctgggcggtgccgctgtggaaaaagggcgcgtcatctggagggagatgtggaaggaaagcgccttgccttccaaggcacggtgggtgggagtgtcggcacacgtccgcagggacgatcatcattttagatcatctcaatcgaagctgcacttcatccattctcattctcaggtcacttgtttctctatagagcagtgtcaaaggaaaagcgagaagagtgacagccgggaaaagctcaaccgagttggcgacaatgattctgcaccccgcagggaacctggtctagcgccgagtctatcccctgttcagggctttgtgccacgactcgatgggttctagccaaaccatacggcttgcagcttaaactgtgacagattcccagaccgcgtatcgaagcaaagaccctagatcagtagtaccatcacgagctaagactgaaccagtcttaagttcctttaaacggtcaagagttttatcaatgacctcgcccatcccactcgcgtggaaaaatttcgcaagtcgatagtgatagtctaacaagaccgggtgtggaagacgggactctgactcaggctgggatgcatctacgaaagtgacctggtgggggaggaatgggttcatttcggtggggaagcgcttgaaggtgacgaagttgtacgtatgcggagcgttggcctaagtcgataattagtcctaaacgaacccttcactttccagggctagaacacagacgcacgatcggctcgaaggcacatcggaagcgaccgaatgcgcggtggatagaatggtgaagcgtgaggccattctcgatctcattgattctggaacttcgcatgattgtgcgtatctcagggaaacatcggtagagggtttcccacatattcgagatggtgcttgcacctttctgctctaattagtatgtagtcttcaacaagaaggctctaggaaaagtaccatggggtcgtagcttgcaaacgaccagggaatgatatgcgcagcttcgagatccccctgtagaacatcctccgccgaccctgtttcttccgccttgtcgaacgatatggcttttgtcaccacacaacgatctctatcacgttcgagacagcccttgcggaaatccgaatctcgcacttgcggctcctcaatcacctcatacacggcttgagcattctcacgtcttttttgatgcggtgagtcaacaggggcaggtgtttttccgccagacgctttaactatgcgaggtcagtcacatattcacgccaagtttgcatggacttactcggttggaggagacaagtgcgaatattctcataggtagccaggagcatctcgtcagattccgcatcgagaatatcgtgcgcgatagagtttcttcctcctggcggaagccagtcaagcagccccccaaagcagtcttgcagcttttcggattcctttgtgacctcgtatcgactgagtcgttcatgcgtgcgagctttaagatcattccagccatcttcggtcttctcgacctcagtctgagcgaagctaggctctgaacaaaatgtcccttgggacggagagattcgacgcggttggcgggggcgggttgaggagcggggcggtgggggtggagatgattcgtgcttgcgcttaggcattgttaggggttgcagaggacaaggatgtagtgtcaagaggtgttcgagggatagcaacactgcagttaagccttaaagactattaaatgcgttcgtgaaaagaagtcttctgcattgggccgttaggggcaagagctgtcccattggtctcaggagggcaaagcggtaaaaaagaaagcttggcagtatgacataaatagcaagcggtgtacccatatacttagaagacgggagcaatgagcagcttggagtctgattgcttctttgttttcccccacattctctgagccttctctaactagtcctcttgtattaatttaataagcgaaactcaacccgtcatagacagaatttatggcactttgatcctccgtacgcaaaacggtggttcacccctgatctcaaatctcagcaaaaggaggtaaactatacgcgacgcaaatggcaagagagctgcgcagagataaggcgactattaggcaactagatcacagtaatctttctaacgcgggttgagcaggagaattgttcacccgagccggcattgtcccattccctattttccaagcggtatacagaatatacgcccgccggtagacgatcggtagaagggcgcataaagcaatacaagggtataataaatattatgacaacgccaatcacactccatgttctatgaatacttttaccaggataagtttggatggtggtaacatcgccaatctcggtagatgagggcactgtgggtcggcttaccatcatgtcagtgtccatgcccattccttgaaagtatgaaaaacctactagtatagtggattccgagccatggccggctcatcattatcttgagtcagggagggggtttgtaattccacggtgggtgccatggcaggctcatcatcattttgagttggtaagggagtttggaattccatggttggtggacggatggtgagtggatggatgaacgaaggattgatgaatgaaggacggatgaaggaggattggagataggggcggagggtggaatataaagagaagaagggagaaggaagagggaaggaaggatggaagatggcaaacaaaaaggctcagagtacaaaatgactctatgtcacatgcgaggcttttgggatatctgttttccctttctagctactcttcttcaacatcataatccatcacattcatgcctcatcgcaatcagtatggcatccctgtcacttttcagacaaagagctaaccatgaggcattcagtcatggcattcgacgcttctactgcccctcgaccccttctgggcaaagatggagcagagcctggcttctgggctcatgctgcatacgagaacccctggccccgaggaagccgaaacagccatatgagtggctcagtactttatcaacttcaccaaaaccgtttgtatcgcgagccggctttacggccatcaaaagccaagtatgatggaacacgctttttaaaggcagtgggggacaagactgtgaatgtggaggctctgctggcacaggctaccggtccccagctgaaacctggggcagaatgtctgccttgccagaaacacagaggccctttcgtctcctgtgtcgttgtcccgggtattttcagcgaatgtgccaactgccattggtcacagcagtccgatcgatgcagcttcaacaccagccctcccatgtcatttgtccctcgacggaaggctgagcccacagtcatccccactggctttacagatacggatggggtgagaacaaaattgacggggagcttcgagaggcacgtcttgcgcgaggtaaggccatggcactttgttgaacgtctcaacaggcggattgatgagattctggaagcaaaggccgcccaggcatcacggcctgcaggtggagaggactaagggcctggaggtcttggaaactagcatgtgaaatagtgcttgtatgaactacatttctgacacaggctcgccatccagtacacatacgtactattttctctaaagttcggtatctaggccacgctctccaggaggaatggattggcagacaatcagagtaagcataacagtattaaaacgcagaagaatgataacaccctgatgcggtcccattactccgatccccgacactctaagaggcagagctactgtatcggggacgtttgacggccctccgacgagtgctcgccttgcttgtgcgtccagtggtcattggtgactgcgtagacgccgagtggataatttggaggaggatgcgaacgatctcctcgtcctggctgtcttccagaccccagtggaaggtcctcacggaccactttcgaatgtcagaccaatgaaacaacggttaacgtgaaggtcactttcttcttaccttgctgttcttactgatcttgtaaaagtggaactgtctgctgtcggtcacaatcccgtatacagtggtgtctttttttccgcgctcctttcgtccggagtgcacgacacctagaagctggtcagcaatgcctttggcgtggtgcaatagacttacccatataggcaaggacttgtttctgccctttgccaatttcgtccgaggtcttcgtctctacaatcaccaggttggtctccagatcctcatgctccccataccatagcgtatagtcggggcggccattcagcctgtgcttgagcttcattcggccgagtcgggtaatatgcgagaatgaggcctcgtagctccatctcaccggatgtgccaccgcaataccgacttctatggcgaagccaagaacagcgctgaacagagggctaagccaagcgcgtacccatgcctcggtctctcgggacccagcttggcaattgtgctggtagcgcattgctcgcgctatgagaacaaattagtacagggctaatgttaggaggacagggaactcacagaggtagcgcataaattcaggaaatacgtcctggttgtttagagctgcggtatcgaacgggggtatgtcccaggaatctcccgcctttaggttcttctgggtcacctgggtgagcctaaaaattgactcaacctcttgcgaggtcaagtccttcgttgggaggttattgtccctcctagctctcgtcgtgatgtcgttaagttcggtcttcatctcgtcaacctcggacctcccaaggtttgtagcccttgaaagccatcgaatggccgcttctgcgccattcttgacctgtatccaagcgaggtcgtcggaagttgctttcttcttcggcaccaccttcgttttcctaagggagaacttgagaggcattatgaaaagattaggggtgttaatgaggatgattgtgaggtactcttgtgtagggtagggggaaagaggacagaaatggtgggaaacagtggtgaacagtggtatagtttgtgttggcctgaggcatcacataaaactttcccgttgcgtcattccgcgccgaatctcgtttgacaacatatctgtggacgacgcagaacaatgaaatatgcaattcttacgcagaatgcactcaaacgggcttcaatagattattacttatgcggccagactgtatgtcactctaccaacaggtggtatcacgtgtctccttgcagacccagaccaagtctcgaaccgcgactagaggacctagggaaagtaattgtcgacgagtactcaatcgtccgtgataaatatagtccgttatttttggttcgaatagtgtgaataattgctgactcgtcatcagctgcaccaaaataccctgtcgttctcgcccatggcttgctcgggtttgatgaactgcaccttgctggcccatatctccccggtgttcagtactggcgtggaatcaaagaggccttgacggcgcggggtatcgaagttatcacggcgtcagtgcccccgtcaggctctattgaggaacggggtgaacaattggcccgaagcattgaggctggggctccagggaaggatgttaatatcattgcgtatgttccctccatttcctggttagagatatcgacatattctgaccctagtttttgtacagacatagcatggtgagacccctcaatcattgcgacagagttaatgcttatctgtgattaggggtgagcaataagatcatactatacagcacaagctaattaatgggctgcaaagtggtcttgatgcacgatatatgattactcacgtacgaccggagaagttcaaagtcttgtcactgaccactatcgcgtctccgcatcgaggtgtggcgcatcatagcttctcatttgcctttctgctaactgtctagcaggctcatctgtggcggactacgtatttgatcaaattggaggttcgtgactattcacccgctttctgagataactctgaagataacatctaattctgtgtagccgatcgcctaccccaaatctattatgcccttaatcgattaaatgtcgagacaggtgcattcgctcagctaacaagaaaatacatgaccgggactttcaatcctaataccccagatatggatgatgtcaggtaagtgccatgcatttccccccctatacgcactgctgacattccccagatatttctcctatggagcagcaatggagccaagtatatggtccccctttcggctttcacaccgagtacttgcggatattgagggacccaatgatggcctagttagcgtgtctagtagccgctggggaggcgatgcaggatacaaaggaacccttatgggcgtgagccatctggacctgatcaactggaccaaccggcttaagtggctagtcggggaagtaacgggcaacaaacgaaagttagttgattacaattacaagaagtattttgggaattatgctgatctttatgcaggttcaacgccattgcattttacttggacatcgcaggtatgtgttacggtttgattgggttaactgagactgataagctgattgttaattagacatgttggcaaaagagggactttgagaaagtgcccgatataattcatgtgggttcccccttagcggtgttatggctgtttcggatttgatatggaaattctggtgcctggagactcctggagactcctggaagtccctggtatgttctcattctcgcctactttgtatgtatggacatatttttgtacagtggaatcagcataatagatccgtcaattagcaacagacagttaaaataatatatttactcaaggatgcaggcaaagaagggtcatactatgtactacagatccaacggatttatagtttccgggtactagcggaatgagccctttgtctcgaaaagtgtggctgtgattgaggcgcagcatatatgcctaatccaaccttctagcctttagctattcctgcaacagttcttggtcagggcgagaccgcggcagttgtctgttgcttggcaatcagttgatctgcgaacgctcaaaacgtcattgcgggaaccttcgcatataatccgcactcgcccccatctcgcagccccacgacatttcttcaagctgttcattatttgcatatttcgagagcttgataattgtcgcattattttccacgaccgcacccccctatttgatccttcgaacgccgccaccaaccgaagatagagccccgccagggcccacgcgcccgccgccatgaccgcaaatatcgtattggacagccaccacacgcattatacaaatttggacttcctcagaggcaaggttgtactacagctaccgaccgaagcagccatcggagccattcacgtcaaattggagtgcgagagccgcactcgtctatccggtcccaagcacccccaacatgtgcactcagacaaaaagcgaacggagcttgaggttcacaaggtgagaggatatggtttatcacacctatcagtgggataaaatattgactggagcattggttaatcaacgaatgtagatcctgtacaaggttgccactgttttcccgacaccaggtgtcatgcagaatgggtcccctgcgcctgcatatacatttgctgcagggtcatatgagtaccctttcgaattcaaagtaaagagtctattctatggcaatcagaacacagttaacgccctaccagttccctttcaataattcatgcagcacgaccaacagcatgctcaccaatctaaacttttccgggttgaaagtcgaggtagctaaagacaccaatcgacacgtcaggaagactctcccgccatctttaagcgggttcccaggtgtagcagatatcaaatacttcgtcaaggccacagtcattcggccgcagttctacaaagagaacatcagatcggtaagtagtgatatgctccgatacctatgctattgtcgcactcgctaattggtttcgcagattgtgcctctgaatttccttccaattgagccaccaagagtcgggaatcccaatgaggaaacctacgccaggcggcaacatcaattctccaaaacccagggcgcgtctaagaaaaagagcatattctcacgggggtcttcttcactccgagagacgtacccagagcctcctcgggtgtctgtggatgctcgacttccgaacccgtctattctcacttgcaacgaacctgtccccctccgtctcctcgttaagaagctgaccaagggaccggacgtaatctttcttcaaatgttgcaggtggaactaatatcctacacgaaaattttggcccaagacctcactcgcactgaaagcagctcgtgggttatcatgagccgcagcaatatgaatatcccgttaggcaacccggaggactccgtaggcactgattggactattgattcaaacttatggaatcggtatcccttacctaactcggtggcaccgtcctttgagacatgtaacattgaaagatcttatgagctggaaattcgagtgggcttgactcatggaatgcaggtatgttgaaccattaaccactagagttgtctcttggctgaccatggcatagcctcaactgattgttctgcccctgcgaatgccagtcaaagtattctcaggaatcgctccaccacaggccctcctagatgcgatggccgctgcatcgcttcatccatcttcctctagactgaaaccccagcccagcttgccaggagaggtaggaagcagtcgaccagtcatgccaccacgaccaaccggtgaacctgtacctgtcaattccggagatgcatacgacgacgcaccacccagttacgaggatgccatgggagaccacctgagtccagtggatggaccacgtcgcgagtatcacccaccagacgcctcatcacaaagcacagtagaatctggagctgatgccaagtccatagcccaaccgggtaaggcgcttgaggatggacccgctgcggaaggatcctcggcgcctcgtcgaggcaatcgtgcttcctcggagtccttcgacatgctacctaccacaccaccggaatctcaatctggatcgcctcccatatcccccgtgcgacgcccagcgagcatgatgaaaatttctcagaacaccgttgatgaagaaagtccgccgcaatatgagcctgtcgcggggaatcacctgaacgctccccaagctgtgcaacgccagccttcacggaataatcttcgtcctatgaacttgggcgttcccaatcggaagcctgtgccgcgaagtccaaatccttgaggttatggactcaactgtttcactaatttggtcatattctcccctctttcacgcttagtgtccgggtttgaaattaattggagcttcatggcactttgcctgtgattattccagcactcatagcattacccatcaaagaaactgcattattgctaccttcgaactcgataccccatcacgtttgtgtcttgaaaagtttttcaggttatgttcttgttcttgaaatgcatcatagcgttgtgtctaagggatctataatactagtactggtgtagcgcctgttgaatatgatagtttatttacttccacttccgaataatgagccaaataccgtccgatatcatcgtggcgcgcatcgtggcgcgcaggtcagtatggaaataagttcagatgtgcgctataccgaaaacggctagcgcaccctccacgcggattgagctttcctcttccacttgagcatatgtccaatcctatgggcatctgtcctcaaattgaatcttaatcgaaatccgctagaccagctcggactaactggattagccccccgaccgaaacattaccctcgagtattcgactcggaacctcctagcaacacgaaaaagtacattcaccgcgtcaatgatttagctcgcgactgaccatccacgatgcgtctccaccttgttatctcgcgccatggcctgccggtcacgcgcattctctggacgacgacttcgtctacttctgtgttaggcgaatatgggactcaacgcccggcatcaaccgcagctgtcgcgtcctctcgcaccccgaacatcgccttctcgaatggcgggtacacggtcgcacaactcctcgaggatgtgaacgaagttgtgccgctggaaactgaacctagtatctttgatacggagttcagtggccagtggggattggaagattatgttgtcgaggttgccggctcggaatgtctccattttatggaggttgacggcttgctccgtgacggagacgaagttgtgtatgtacatctaacaaatgttcttatatcgtaaactggactaatttctcgccttctagcatccgcgcccttcaattggcagacctacggaccagaaggctatgtggtcgccaccaaattaccgcggagggcaagcatctgatcgacggcgtgcctttcgggtcaccgttcttgaaaagaactacctctacacgacctgcaataactattcccccaagaaagaagcggcgcaccgttttctccggctgggaccacgctccagaattggtggctgaggaagtccatgctgacgaggaaggggatggagagtggcttccgcatccaaacaccgggttcggaaaggagctctctgtcatgcccgccgagcacgaagagtccctaggcacggttattcgtcaccctgttgaccatgccacggaatctgacagtgaagtggatatgtctgagatgcctgaggttgaggaagatgaactggagagcgaactccaagcactcaaagaggacttcgacgaagcttctcaatttattgatatcaggaaccagactcggaatgccagtgggcacccactacgtgctacctcgatagtcaagcgaccaacttccaaggggtcacttgcagctgcctcatctctttccagcaagcggtctcgtgcggaagacccatctcctagagcctccaaggctgtgagattcaacaagggagataagcaggaggataaggaaatgcctgatctcccacaacttccgcaggccgtacacgtacagatcgaggaaagtgctgctgcaacctctgattctggttcatccgagtcatccatgtcttcttcgggcagcgattctgacgatgattctgatgatgattccgataatgattccgatgatgattctgatgatgttgattcttcgagcgaggtcgagcctgcggcagaggcaccttctgattctcattcatcctcaagctccgatgattctgattcatcagactcagattccgaagaggaagccgccccttctatcccggtttctgtgggcgctcctggtggagggtcactacgcactaaaaaaaacaaccagcgcatcaaactacgccgccgtctatccaagctcaaggagctaggtgctcttcctgaaaaagcaggtttcgatgcattgcgagcttgggaagacagccacggaggctggcatactccggaacaatatcttaacccggagccattcgtgcaacccccaaaacctgtggaaccggaactagaaccagaaccagaacctgccgaatcttcgaaaaagaagcaaaaaagagagaagaaagaccaggagcaaaaagagttcgaagccaggcgccaaaaattgcttaacgatcttgcattgggtaatggtgtcgatgtgagcgaaatatcggaaaaggaaaatgtcccaccggctgcgtctgccgttggagacacccctgtttcagaagaaatctccggtaaggaagagccggagcaggaaccttcgaaccgacgtacactggacatagctagctcacgacgcatgctgttcggatctcttggaatgcgaaccccgaagaccaaggaagacgaagaagaaacacggagaaagcttgctgccaaagctagtgcatgcggtccccgaaacaaaccctctaagcaagacatcggagaagaggccgaccagatgcaagaggaggaagatgcatccgacattgattggcaaaacaagcttgtcattcgtgctgtcgagtgtctctatccccaggttgatatgaccgcgcctccttatccatttgttcaacgttgggataaagaagccaatgccttgattcgtgagctcaaagggcccagtaagaagcggaagagaaagcagcgtgttcaagtctatgagggacatgagcaagaagaatacgatgaaaacgggtattattacggccatgatgacaaatatcaagctaatgaccaaccgaataacggttattacgaaggtgaagccgattcccattatgagggccaatgggaaggcgaagctgctccttactatgaaggccattatgcaggcgaagctgaaggagatcagatcgattatgacgatgctcctgagcctggacaagcacccaaccccactttggatgacctacctgcgattcctgccgacatgagttctgttcctggtttgacagaaagtgaagcaaaggtcggcgcaatcattgcattccggcagctagacatgtccaaagccacgaactggcaacctcaaatgtctgagtaccgagtagccgaggtacgctctattaaagaccatggggtgattaatgtactactggccaagcgggaccgaaagccccactcagcatccagcgagtatgacgagccccgtcgattcagcaaatttgaagtaccagacttagccaacgatgagggagaggatgatggctatcgcgagcttgcctttgcggaactcagcgatccgaagcttatccaacccgcagcgcagtcaggtgcggaatttgaaggccagaacagagaaggtagcatgtcagtgaaataaactctgattgaaggcttatgcttacatatctaaagtgtctctgtagttcatgaatccgtactgaacgcccagccaaccctttccgaggaaatgtatattgacgacacaaccattgtcaccatcggaaatgaagtcagccatattgagtcgcctcgtgaatccccgggaatgcccgatgaacctatccaacaaaccccaggcagagacctgccgcagattcaagtccagagtggatcgattcagcgcagtgtcactcctcccatcccttcaccttcttttactggatttcactctgctcgatcctggcagcagatgacccctggtgtagagttcagccgggagcttgaaggccatactctcatcggaggagacacgccatctgctctagtcaatcgggacgaagatccttccgccttgtcatacgcttctgcaaatcaatccttcgcggatgaaaccgaggaccaggaaatgtcggagcatcaagagcatgagcgccagattgtcagtgaaaatattttaccgcctggcgattcgggggacagcggtcctcagtctggctcacttctgtctaccattgaccgtagcggtggtaatggtggtcagggtggtaatagtagtgatgatgatgcgtcggattccgattctctgtttgtgaaaagcgatacgaagagagaaaaacatagtgtggctcccaccagctcttctgaatcatggaaagatcttttgaacagattaaggaatggtccaccagacccagacagcaacaacagcagcaacagcgaagccaacagcagcaacagcgaagccaacagcgaagccaacagcgaagccaacagcgaagccaacagcgaagccaacagcgaagccaacagcgaagccaacagcgaagccaacagcgaagccaacagcgaagccaacagcgaagccaacagcgaagccaacagcgaagccaacagcgaagccaacagcgaagccaacagcgaagccaacagcgaagccaacagcgaagccaacagcgaagccaacagcgaagccaacagcgaagccaacacaatagcgaagacaacaacagcgaagttagcgaaggcaatcaaagtcccgagcggctggaagatagtctgcagcactcctacctggatctcaatttctcatcgctcgatttcccacggccatccaactcacactctcccaacccgccaacgagtgcccaaccggacgcgcagtctcaaaaacaaacctcaatcctttcgccatttgagacgaagcccgccgcaactactcgctccatactctcccagcgggtgcatgaacccgaatccgcctcccaaattctctcctcccaggcatccgaagtgattgacctcacttccagcccacgtgaatcacccaaacccagcagctccgatccgaacccatcccagcgctccaaatctgcagtgtatgggaaatcacaacgtagcaaggacatccctcgctcatctggacgtccaccccgagcttctacggggagactccaacacatggtggaagtgagtattagtccttccagccagaagaagaagcgctcggcacgaaagttctgagatacggctggattatgtgtcattgaaagttgaagagatattggatgtactttcattttacacgtctgtatatttacgggcgcagagcgatggcgtctaggaacttgcacattctttctttttttttttcctggacattattttatttcggctccaatacaagatattattctgaaggtccttgcagatcatgacaaaaccctgccagtgattggttggattcatggataaggtgatgtcatggtagttgtatacttcaagctctagaggtattgtacatctcccacatcttcgaagccttgcagtcaatcaattgaactaaccaaggaactggcctaggaaagcaggttcttctttcatcttccctttttccctgcccctaaccatgtaccgtctaagtacgtggccatctatgcaactatcccggcggtgtaactttctactctcgtcattacgccatatttcctcaccccgcatatccagcttatcctggacctcttctgctgctgcttcttcttcctcgtctatcccttcaatatctaccaagtcgtcccaatttaagccaattcaatccaaacgcaatctatccacaatgccccaggaatacaaactaaaggacatctcctccttcgcatccctcaactctctagacaaggtcgaggttgaaatcgaaggcattgaggatgggaaggttctcctcgtgaagctgaacgataaagtctatgcccttagtccacggtgcacgcattacggagcaccactgaagaatggcgttgtcactgcagaagggaggattacatgtccctggcatggaggtgagatgcttgtttgagtttcttttggttaggggaaagaaaagaacaaaatactaactactatatctacagcctgctacaatgtcgcaactggcgatgttgaagatgctccagctcccaacgcgctgaacaaattcgaggtcttcgaaagagcaggcggcgtctacatccttgccaaagaagaagatgtcaaagcaggacagcgcaatccagttgtgaaatgcactgtgtcacagccaaaggagaaggttgttgtgattggagggtaagtcacccttttttccttcatcactatgcacatgtttctacatttcctctcgttcgaataattggatacccatactaacaacaaacagaggaagtggaactcttggccttatccaagctctccgcgagctaaaataccccggggcgatcacaatcatctccaaagagcccgatctgatcatagatcgaaccaagctatccaaagccctaatcacggacgcagccaaaatccaatggcgaccacgagagtggtatgctgaagccgccatagaaactatcacagatgaagtgactgccgtggacttcgaacagaaatccatctccaccaaatccggccaaaacatcccctacaccaaactagtcctagcatcaggcggcaccccacgcagactcccgctacaaggcttcaaaggcgagctcaagaacgtcttcacccttcgcaccatccaagatgtccgatcaatcctcgcagcagccggcgaagagagaagaaacatcgtggtaatcggcagctccttcatcggcatggaagtcggcaacgcgctctcaaaatcccacaatgtgacaatagtaggcatggaaacctcgccaatggagcgtgtaatgggcgcacaagtcggccgcatcttccaatcaaacctagaaaaagccggcatcaaattccacctctcagcgaacgtgagccatgctacagcctcctcctcagatccgcacaccgtcggtactgtccatctaaagaacggaacaagcctcccagccgaccttgtcattcaaggcgtgggcgtccgcccagcgacagacttccttcacgacaacaaatccataacccttgagaaagacggctccgtcaaaacaaccccccacttcgtcgtgccgggcttgcaagactccgtcttcgccgtcggcgatatagcaacatacccctaccacggtcccggcgctgaccctgccggctcgccagtccgcatcgagcactgggacgtcgcgcagaacgcgggccgtgctgctgcacgagcaatcgtgcatgcgctgtgtggtccgctgtcgtccctgaaacataaggtgtttattccggtgttttggtccgcgcttggggcgcagttgcggtactgtggaaatcccattaacgggtatgacgatgttattttgcaggagaagggggaggcgaaattcgttgcgttctatacggctggagagaccgttgtggcggttgccactatgggagttgatccggttatggttaagtctgcagagctgatgagagtcgggaagatgccgagcaagggagatattgctggtggtacggatgttttgagtcttaaggtttagctaggatatgatgggatttgaagtttggatcttaatggatatgtcgggaaatagtttggaatcaagtgttttctttggtcaattggcatatacacattcgaaacaaatcggaaaataagaacaagcaaaccggaacgcccatccaggatgtagtcaacattgatgtatgatatcggtgctcatggagacatgtacacagagcgaatttattcgtccttgctcttcttcgacttggaagtggacttcttctccttcttttccttcttctccttcactttcttctccttcttttctttcttttccttcttagggctaggctccagatgcacatccacagtcgacagctcttgcactgccgacgccgccgggacgtccatcacgggaatagacccagagagcttcttcggcgatgggaagaacgacggaggcaaggactgtccctggcgctcagactcagagagtctctcctcctcctcaacagaaagcatagtcccctcaatactaaggaacccgcgatcgcgctccgaaccaggaatgacatccacatcaacaacacggaagcgcacagagccagttacgcggtgtccagaaacagactggaagtaaccggtgtgagcagacgcatcctcctcgccctcgatcgcgatctcctcagccgaaagcgaagcaggcttgaaacattccttctcggcgtcgaagtcggccatatccccatcagaggccgagtcgtcatcggtcaaagccggcgtctcggcctcctcgccaggcggcacccacttccagttcgaaggcagacgcttgcgctcaacgccgacagagaacaagttgaacacgacagcgccgaggaatccctccgactgcacattcacccatccatcgagagtctggccgcgctttggccggaacattaggaacgtagcggtcaggtagacgtacaagacaccgtactcgtccgcggatttggcgagggtgagcggctccgggttcggatccgagaaagagcttgtattggccggcggattgctggaaatcgaggcatgggagtacgccaggacgatgcccttcagcggtgggaagtaggttaggagcagtggcgagagatgctcggccagcagcgaggccagcgcgtgcgttggcgagatggagatgggcgacaggggcaggtagagggttgctgttgtgagagtgaagggggactcgggatcggagtcttggacatgttgtggagcggcggcttttgaggatggggtttgctttcgctttttggatggtgatgtggatgcagatgcgtccttgtttttggatttgcgcttgcgctctgcgtccgctgtgcgcagcggcatgttgtcgatttccatttcgtcaattgccatcgtggaggcaatttgggcgctccacggagcttgtcgtgtcaatgtggagggattagagtgcttcttttttttttctttttggcgtcgagaactttttttttcatttggcttttggtatgacgagatgggaaggcggtgggactgggcggtgacggcacattaaatggcccccggactattttggggttggttacaatcgccaagtggcgcttagtatctattctatcaatatttttcttatttttgtttgatatggtgcaggtgaggttattcaggtgaaattgattccctcgtgatgtcgtcacttctgcctttcttcgggtgggctgttctccccaatgtgagtggagcgcgatgcggagctatacaacacgtggaataggagctaatatgaatgacagtatgctacatcgtttctacagagtgtctactatggcatcaccatacgcgccggtgaacccaagccactcccgcaaactccgcggttcgaacgtcatcgtcgccgtatcttcatcttcgtgatcaccagctacctcctctacacgctctacgagacattctaccaggtgcagcttgcaggtgattactatcaagccctcggggtatcgccatttgccgatgaacgcgcaatcaagacccgatttcgccggctcgctgctcagtatcaccccgataaagtcgggctggacagcgggtccgatgcttacttcctgtaccttcgacgcgcgcaggaaacattggtggacccggtgaagcgattcgcgtatgaccggtttggaacagacatgcttggatggggggagcagaagaccatgcgcgacttcttgatgacctcgctggtcaagtcgatcatcccgcaatatgtcgtcgggtttatcacaacgcttgtgctgaactggctgtggtgggcgaattggggccgttacgtgagtataccatattaccagcagatgttcaattccattcgctgactgttgttagtggcgcttctacacgttcgccgcaatgctgaccctcgaactcggcttgattacgcaccccaaggctgtgttcatgcctacctcataccttcccgtcgcgctacaagcatggctccctagacaatcgttctacctcctccccttccagatcctgacgctagcacgccgcgcctccatcatgctacacattttcatctcgcaggccgcaccacccaccgccaaaatggccgggaatggcaacggcgataagatatcaccgcagactgtgcagcggatcggagagttgatccagttgacgcgcggcacggatatggaggcgacgcgggcgctgcagatgggcctcgcacctttccgtggtgatcgtgaaaatgtgtcgaggctccggcggggtatgaaggaagggctgatcctcggcggggtgcggtccagtcctgaggtgcaacgtgccgtggcacaagtggttgaacgacgcaaggccgagggtgacagtaagcgcgattgatggttgaaagaggttagatgtatattacatataagctattgtattcccattgtaatccgacccgattctgaatttttgtcatttatctggacgatctcttggcggtgtcgcgtaatttggccattcttttggttccgtggactaattagcgaagttcacgtttccctggcacgtagagccgtagagccgtggtggcttgagaagactctcgtgataccctcaccagatctgttgagaatgggtccctctggactggatctccaatagatgtgagttatctgagtgaacgacgaaaaagacgcatctctcgagacatcatgcggtcagtgagttattttttctccgggatgcagcgggtgtgaaatgagatcaacggattagggttgggtttgtgtatggagatatggaatgtcgagtttctagccctgtacgagagggcaatagccggacggagagaagacgcagatatcatagacaaatccaatacaaatacaaatataagaagagaccaaaagacgaacaaaagaaacgaagctgtatatcggtatcgtacggtactgtcaccccctcgtatcacgccctccccgttggtcccgaagtggctggacgcaagttgtaatgacagtaccaggcccgatgtccacaccttcaacaccatcccctgtgcttcatggcctgaatgagttttttttttcttaaacgatgaagagggcccacgatccctttttacttcgccccttccttgtccttcttccctttccccttcccccttccccctcccatccctctttctcacagactatgcgactacacatacttcttcatctataacgggcggtagagacacataccacgtcacggtgaattgccttccgtcaattattccccttccatatccggtaccgcgcaaatcccgtttccaacacccatccatcatgcccgccgctactccaaatggtcgctcacgcggagccaagaattcacccaactccttgatggtggttctcaagctatctggggatgccctccagcagttcgccagtcccagcaagagccaaaataatactcccaacattaaatccaacgacaactcttcaccagcctcctccgccgagctccctactgtccgcccatcttctgccgataatggctccgacgccgacgccaattctacgcccgccacaggggcgactgcaggcgatgcacaacgtcggaagggagttccgggtcctaagccaggaaacaaaagaacaaaagaccaaaccgaccctaccgcaaagtcacggggacgccctggccccaagaagaaacccagactgtaagccaacccgacacattttcgaatgagcataattccagaaaagaaaatagtcgaactaacatatcatcgatcttagtgacgaaggcgaagccacaaagattccagctgcacagcgtctgggaccaaaagccaatacgggagccatcaacgccggtctgcgcgcgctagatcgcaccggagccgcgtgtcgcaaatgggagcgcaagcccctacagctccgcagcttcaccggcattttgtggcaacttccatcctggcgcacaccgggtatgcccaagtccggtgacgcggttaatggcaaggttgcagcgctggaaagtggcgacagcgacacaaagaccacgcttcatgcccccggcaccgacacggccaatggcagcagtgctgtgcctagtgagaagagcaactctggggatggcgatgtcacccctacttctcatctagtcgagccctcctcgccagccattgctatgacagcttgaatacgaccgtgacgagttcggatgtggttttcgtgctgtacttataagtttcgcgcatcttctgtgtctttctttcttcttctttacttagggttttatgtcggggttgggtttggcgttggagggaactgtttttatggctaatggcctttctgcacgaagggctctttttttccatgtgcacgggttgtagccggggatctggttatttccctcggtgtgttctgtattatagcccttttcttcttcttcttcttttttcttctgctgacatcagctatgtttacatcttctgctcgaagatcttgctctgtgggcacaacgcagttaattttgctcatgtggtctgtttatacatgatagtatagagctatatactactcccttagatctacctatgttgtatctacgtattaccgcctttcctatgctacatcttcccttgtgctcaccgagtactccatagacctgctctgatcatcatagatctgcttactgaacaagactgatccacccgtggactcactgatactcgctgagcgctctgattggttgtttcccgctgagtctgggccaggccgcagttttaggtttagcgcgcctccgtatactaagtagcatttttggctcgcaggccttgatgagctggtcgatgcaattaacgacccaacaattgctctccaagatgaggtgcgaggtgtacaatggatcttggagcatctgttcgaagaggaaaaacttccagcatcgttatacgatgaactagaatatagccgaggggtcaaatcctcggccaagtcctggacaaaaaccataagaaagattgctgttttttcatgaaggatggaaagtaatcctttgtggaaaatggtcccggaatcaaaggagcagagactggcaagtgaagacgttccaggtataacttcctagttaattttttggttatagcctttctaaactgaatacacggctacctctatacaagagctgagctcgccgtcaaagtcttggcgatatcgtgagaaatctgacacagctgcaaaagagtctagccgtggctgtctctgcatggacacatgcaccaacgagggcagtcaaagaccctgggataagaacaagaaccggctatcgatgaagatcaaggactatgttagcaaacttggtggcggctcattcttgtatcgagtgtctacttgggccgctttagctgcgatgatggcctttttcactccggtcattcacagtaggcacttggacaacgagttggggccgggtatctatacatccaattctctagaatgggtcctgaattgggttccgtcaatagtgccttgttggtcttcaaagaccctggtttccgcaatttggatgtctagaggccctctcttcccgagtggcagcagatcatcgtaacttggacacgaaagtcactttcgaatgcaccggattcggtacatccgaaatgaagaacagcagacatcatccaagggtatttcgaagccaggttctctaaaacaaactgtctaccacaacccagcaaggtctcatagaccgctgcatttagtcatacaggatgtggggcgctgtctgtatcattggcgatgataactagtgagcctggcccttatactatcactagcttcattatcaatcacacttttcattgtggagacgtaagctggccactcttttgctttgagtacttcctatagatggtccacattctcgctaaggacctcagccccaaggaaatcaccactgtcagcctcctttgacattttctacactgccaaagaccgacccgatgacgtcaagatcggagtcacaagtcaagcgcctcttcatgttttctcggactaggaggatggttattcgggatatttccatgcccaatcttaagcctgtctctgagattattgattcatcatattcctctcggctgtctggattggggttttgcctaaccaaattggggccgagaagttagtgatgtatttgtgatgacaaatgttatcggccagccttagctgactacatgcgaatgagttgtcagtcttacatgagatttggcgttctctttgtgtgtctctagattatatatagccaaaatccatattttctatagaagtatcgcaaaacatcttcatcatgggccaaccatcaatcccccctacccccacctcccccccggcnnnnnnnnnnnnnnnnnnnnnnnnnnnnnnnnnnnnnnnnnnnnnnnnnnnnnnnnnnnnnnnnnnnnnnnnnnnnnnnnnnnnnnnnnnnnnnnnnnnnnnnnnnnnnnnnnnnnnnnnnnnnnnnnnnnnnnnnnnnnnnnnnnnnnnnnnnnnnnnnnnnnnnnnnnnnnnnnnnnnnnnnnnnnnnnnnnnnnnnnnnnnnnnnnnnnnnnnnnnnnnnnnnnnnnnnnnnnnncccccccgcccagtgcggccggtaaaaccgccatcatcactggcggtaacactggaattggctacgaagtcgctcgtcagctcctcctcctcaaagcatcacgcgttattataaccgtccgatcaaccagcaaaggtcaggaagctgtcgcctcactacgcgcccatccggaagtgaaaaaagccaaccctaccgccacgattgaattcttccatctcgatcttgacgattttcaatccggcgtggagtttgcaaaaaagatccgcgccgaggtctctgaactacatattcttatctgcaacggtggtgtcaatctgatcagctacgaagctagcaagagtggtcatgaacgtgttatgcaggtcaactgctacactcatttcctagttacattagaactccttcctcttcttcgtgcgacggcagtgagctgtggcgaaccatcacgtctcacgttcgtcgggtcgagtatccaaaacttcaacacactggcgaaaaagcctctaacagattccaagactgtgatcgaacactacgatgacagacagatatacagcgggctaaatcggtacgcggatagtaaattagccgtgcatgcgttcgtgcagcgactagcgaacatcgtgccgtcttcagagcttatcatcaacgatctatgtcctggcatggtagctaccaacttcgaccgtggactgccgctctggttgaagcctgttatggccgtgttgaggaggctgattgcgagaacggtcgatgacggggcaaggacggttatctatgcggctgttgttgccgggcaggagacccatggaaagtttttgcagagtaacaaggtggatccgtgagtgcttccccctgcagtgaatactcgagcatgctaatgattactctagaggcgcacccatccttcaggagaaggtcggacagacctttagcgagagattgtggaaggacattatcacggaggctagcaagtatgacgccgagttgcagagctttgcttgatttataccacggaaattgttggacgtctctgttattatgttctgttctctatcagttactatggcttcgtgtgggataggccacagcatttatacacatctacgatgaagcatttcgatattatatacacaaaatgcataccagctccgccgtataatacggtaggacagttgtaaaggtcttgagtagtcagactatatcatcaactaacaaaacccactcaagaaatctactagaatatcaagcaccctcgcgtgaatctaatccgcaagccccttgcccaaataatccaacagattggtccgatgtgtttaatatagactagacatgcatcaaaaaaacggagctgcattagaggatggagtaccgtactaggcaagtatgaccagatcggttttaggacctacgctacaatctcttgccctgtcctggatatgatccgtcttgctcttcctcggttgctcggatgaatcgttggttcatacctatacgacattatgagcaatatatatctgagagttactcctttccttcatttacacaaatcatatagtaaaaccatttacttatcacctcatcaccatgaaccgcatcgacgtgcaccaccacttcatccccccggcctatgtcaacggtatcttaccttcccggaaacataataaacataattaacaagactatagccttcaactcaacctctggtgacccctccggctggcacctccccaaatggaccccagaatcgaccctctccttgatgacctcccattccacccgcgcagccattctctccctgaccgcaccgggcacctctatcctatccgattcccctatggactcagcggccctcgcccggcaagtgaatctctatggttgccaacttcaccgggaaaaccccactcggtttggtttctttgctagcctcccgcatctgacacctgaaaccatcccatcggccattgaggaagtcgcttatgctctggacacactccaggctgatggtatcactctgtacactcggtatagtggaactggatatctcggtcatgctgcttttgcgccactctgggaggaattgaaccgccgaaaggcagtagtttttatccatccgacaaacatcacttcggacgctcaggatcagcctcagatgggcattgcaaagctgccacagccgattattgattatcctcacgagacatgccgaaccgcggtcgacctgattacctctggagctatttcgaagaaccccgatgtcaagatcattctgtcccacggaggcggaacactgcctgttcttgctactcgggcggcaaatctattgtacgatgcgggtctgaccgagatcaccccagagatattcatggagcaggctaggggtttttatcttgatcttgcgctttccgggaacgaggggaatttggagttgctgttgggcaagaccgggtttgcaaagccaggtcatgtactatatggcagtgacttcccttatgctccagttaacaccattaacaagtatgtagggatgatggagggattcttcgcaagagaagaggagaaggaagaggagattgcccggggtgcggcggtagagttattcccgcgatttcggattgaggaggatagggaggaggtactgacgaacccaggctattgatagatacgtatatacagggttgtgtggagagaaatacattatcatttgacgatggtatacctgaaggggaacacttccatcttttacttcttagtattcaatctaacacttgtagtactttaacagatttcagcttctcattgataatgttaactagttaactagttaactaaataacagataggttattaataccggtgaatgaacatatctacaacgatcgatgtgtttactacatgcgaagaagctatgtatatcggtagcacagtacacgggcatgcctaagtccacatcagctcgtgacattatgctcgtctcccctcttttccttgacactgtccttctccccgcactctgtgcatgactgagactattcgtggtttctcaagatctagctatttcactatgacttatatcactgtgactagggtctgaaattccggatttgacggctgtatttctctttgaatataattatagtgaggtcgcaacgtggtaagatctgctgctttcggacctgtcacgcaacgtcggcacttttgccggtcttgtttccacgcatcttttacatattccagaccttccacgcactttcgcaccaaatgcacatatgatccccacgcactttgcgcagtagcttcaactaccacgcactagaaggtctgtcttcacacgcaccactacaatggctaatgcttagtaccacgcacttacagaacccctccactgagtagcgcaagtgtctaaacgaaagaactgtggagccaaaagccagaagcgaagcaggaacacagaaatagtggccttggtttcgtggcatcagttggggggcgacccgtgaacatcatggccgatgctccattctccccatccggtggagctcgagctccgacctcgtaccccaacatctcctccatcccacgccgctcctcctacgcttcagtagtatctggcaacacattttcctcaccaacctctacttccttctcacatctactcaacgactcccatccaatcccctaccccccgtccgacagccgagtccaccgggctccgttcggcgtggatgccgcagacatgcacatgaactccgcctggagaaacacaggttcaacagactcacttcctccctggtcccgcaagtatgccggctttctacgctcggccgagtttccgcacggcctaggtctcaccgacagcccggccttcctcattccatcttacctccgcaactcccgctacatcgcccgtctcgaaacagcccaccgcgctaagctcgctgctcagcagcgagaaccctcctcatccacaacctctaatcctcccctttccgcatcctccagcaatgtccatctgccccgcattgccccgtcgcaccgcggcatgacatatgatatcatagagaaggaaccgtcggcaccggccgatcccctcatgcccttgcctagccagtggagctccgtagacaagttttctggtctggaactgtctaacgaaaacttcgatgttcgctacactggtcccatgcacaagcatgatcatgaggccgctgccttgcgcgcagatcaccctatgccgccgcagtgcgggatctactactttgaagttaagattgagtcaaagccgaaggaagggtatgtggatgagctgctcggtggatattgggggtagaggctgacccttttttttctagcatgatcggcattggcttttctagccccaaagcgtccgttgagaggcttcccggttgggagacagaatcttgggcttaccatggtgatgatggaaagtcgttctttggcgagagtcaagcacaaggtcgagcgtatggaccgacgtttggtgctggcgatacagtcggatgtggtgtgaatttctctacaggatctgcgttcttcactaagaatggcgttttcttgggtaggtttttgtgtggaatgtaatgtggatatcttaggctaattttgacaggaaatgcgtttcacgatctgcgcaatacgaatcttttcccgtctgtcggaatgaagaaactaccgccagtacatctcaaaacgaactttggacaggagcctttcgtttttgatattgatggcatggtcaaggtttgtgctgtttccatcccatactcggaagttgtcgagctaattcccaccagcaagagagattcaacgttctgtcagagatcaacgaaacatccacggctggtctacaaccaccgttagacgagtcgacacttttgcaagagttagtagcacagttcctcgcccatgacggctacgtagacacggctcgtgcattcgcagaagaggtggccaccgaaacacgggccctgcagaacggtcgcaacgagccactgaagaaatacgaagtcgaggaagaccgcgaggctatcaaccggaacagtgagtctacacctccgcattcctcccatcgccaagtccccactgacagcccatagaaatccgctccgcaatcctagacggcgacatcgacaaggccctcaagcacaccaaagcttactactccaacgtcctagaagaccatccagaaatctacttcaaattgcgctgccgcaaattccttgaaatgatgcggcagtccaacgaactctccgtggcaaccgccgcgaagcgccgccgctcgacatcctccaactcgcacgagcatgctgtcttcgatcaggagatggagctcgacgacggggatggcgacgcctgggccgcggacggcatggataccgaagaaccagaggtcgtggcgcagttcaaccagctcctcacagaggcagtacagtatggccagcagctgcgtgctgattaccccaccgacgagaacggcggcgataagaagctgctggatgatattttctcgctagtggcgtatcctgatccgaagagatctgttcatggccattacctcgattctgaggggcgggttgctgtggccgaggagttgaattcggctattcttggtatgttgcttcacctatttattctgctgcgttgtctctgcttcctacttgcaagcaaaaatgctaacacagcactgtatagtctcattgggcaaatcatctgcagcagcgctggaaaggctataccagcagactgaagtgctggttaatgagatcagtgaagacggcggcgctggggcgttcattaatgttcgggatgacattttgctttgactggcgctgggttagcatcttgttgtcctttccttctttttttttcttcttcattgatgttcctttgtgtggacgggcctaccgatctcatatatcagttttggcttcatgttcatgttgatttacttctactttcacgactctctattttttccactttccttttgtcagattaacttctacgtatctcttagccagaatgatgagtccgcttgggattaattttgaaagttcaatgacctacctaggtactgggtactggtagcattgtatacaattctttgtgacgtcaagttcattctatacctagaggcggtgaggtccggcaatataaaagcggtaaggcctcgcgacctcgcgaacgctggggcttatctcatcccggctaaatttgggtatccatcgatctccgcctcctcgaattaaagggactcgataatacggagtagtctgtgatacctcgaacctacaaaatcttctgatgatcagtcctctccacacactcagctccccaaaggggccacattcttgacatggatccacataactatgaggatctcagcattcctactcattcacgcgcctccaccaccctacgctgctgctgcggccacaatgattgtgctttgctcgagcataacaatgtagctcttgaggggttggagaaagacctcgcgactgctgctaggctaggtcaggtacgtctctttgtcgaattagttgcccaaatcatgtgggtatgacaacacgccaagctgtttggaggctggctgaaccatgcatgttcgatttgatacatcagcttatcctcattcctcgcggaacactctgtatctcattacttctgttctcctttacttcttcatttcaactactcggactgcacattctgcataccttgtgcacaccccacatgatttggaatcaaatggccacccttggatcacaatctcccattctctcttactgtgttggcgtccgtcatggccacctttcatgattatactgtcaaggcagaatgtttggagccatcatcactgacttttgccctacaggccttgctccaccgtcatgaaagctatatggctgaagcggaagaggatcgtcatcgtttggtcggcagcattgaggatctagaacgtgaaaagcaacaagttcaagcagaaaatgcgcgcatcatcgaagagaatcgcagtttattagagcaacttgacagtctgaatcaagcggtcaccgagtctgacaaccatgtgaagtccctaacagttactttggagaaaaccgagtcagatttgcgaagattgacagtggctgcaacgcgggccgtagagctcgaggcgcaactagctctcatggagacggagcagtctaagctccaagaaagtcttatgtcggtgcaggaagacgagaaatcggccgtccaacggtggagaaaagcagagagcacgctgcgagaccttcacgatcaagtcgaccgtatcgagagagaggcacgcgaggagagggatcgacatactgagctcgtccaacgcatggaacgtaagagggatgtggagcgcgagctagacaatgcagcgggacgtctcaagggtgccgccgcagcctccgaactcaaccgcaatgcaggtggtacaaacgttgtctctcgtttcgttaaggacatattgcaagacaacgccaatctgcaggttgggattatggagctacgcgacatgcttcaaagctcgaatgaagaagtgcaaaatctacgggaacaggttatctctcatcagcccctggccggcgtcgatggtgacaatacacagccaaggcctcctcccatcacgctgagcgaggagctacgagcgaaggaagaacgacgcgtctctcaggaattgcacatccatcatcatttccacacaccaactccagccccaactacgaagaaggaaaaaagcacgctcaaccgtcgcgtgaagaaacgccgcgccgctatgggaagcccggcagtgctgcattctgcgacgcgggccaactcgcctcgaagagccattcatcgctcccagtcatctgggtcctctatgtcaaccattctatcgcaaacctctgtctccatcccaccctattcatcctcccgccgctggtcctcaaactcgcgtgctggggattcgctggcaagctctcctcggtccacgttccggacgtcatcgatatttgatcgtgttgaacgtggccctgatttctcacagtctaccagccctgatagcaccgtgttctcttcccctttgatgcagacacggaacctgaagggtcttgatatgccataccgcccagtcggtggctttgataatcacgatgcacccgacgatctatctgcatttgataatgatttctacagtcgccaagacttctttaacacgggggataatctcataagagagccggctatccccgaggagtccgaaccatctccaccaatgtcatacttctcgcctatgggtgaaccactgacgaccactgatgaaatttttactatgcatgtacagccatcttccttgcgcagatcttcttcccatgacagcttgctctccatctccgttgctgggatggacattcatacacccacaagtcgccacaagcgaatgggagactggcatcccggcatgcggatccctcggcgcattttgtcacccagtgtcgaactagtgttaacacccccggtaatctcaactccggccgtcacagccgatcgtgcaaagagctcagagtatacatcccagtcattgcttgcttccatggctgcgggaaacagcacgaagtccgacacggcatccgttgtatccaccgacagcaccagcacccactcaaccgcacttcatgggcccgacaaagttaagttcggtcgccgcgtgggaggctgggtcctaggccgttggggcatggcaccggtctcatctgagagtgactcgcaagatccgacagactcatcgaacacgtctgtgacatcgtcttctgcgtttgagcccaaacctcgtgacccgctagctcaccgcttcagattcccaggtgtgaatcagaagggcccgataatgggcttgcgccctccacctgctgctccaatctctattcatgcagaaagcatagacgagaatctgctgcgagagagtctagctgaagagaatagctagattcctcgcggtctaaatatctgcacatccattgttttttagcgtttacactcgttttaatcttgcatttacttttcttttgtttacttgtgcatcctcgttcggttgttgcatttcttggattcctggtttgggatggcgcgagttgcgatgatacccatgctttcgtctttggtttcctagaattatctatattatacgatgtacactctttggtcattttcacaatgtgtattttgcaacaggatcctgtagcttagagtggtttttctcggtgtcttttatgcttatttttgaaggattttgataggggactgatatatacacttcgtcgagtgcctcgagacagttggagttttattcgtcaagataatcaacttgaacagtttcgcatggagttcccttggagctggttatatactgtgacaacaagtttcatgcaataactaacttttgaatgatttgcatgatatcaccttccctattcatactcatggcctcgtgatgtaaactcagttcaagttgcttatttcgaccgcgaaatccgatatgtccggagcgggatgctggtcgaatggaagaaacccgtctggtcttctgctggtgtcgattcgaatgggagggcctcaaaagcgagtgagttggtttctgttgatgtttagttgcgtaaggcatgaccatcaacgtccatgtatgaacttcaagactcaccacaggcatttagaaacgtgcggaaagtattttcattgcgcaggctaaccgcagtgatgaattcttcaatgttatagttctcaaaaagatcctgcacagtagacaggagtgagggaacaaggtcggtatcataaacctaggtatgtaagcaaaaaaacctaagtgaacagctcataaagacactcactagatcagcaccgagagcaacatcgaacttcagccctgtcccttcctcaccctcatcagagcccaacccagcaagatcccccaccttctccagcggagttccccactcccagacagcaggataaataggaatggattcacgcccatgcaaattatgcttgacacaagcacgaatattatcaacaagtgcgggctcacgatcagtagcaacaatagagcgcacaccaagatggcgtgcacaaagaaacgacaagaatcccgtgccagctcccagttcgataacgcgtttaccgcgcacaagagcctcgcccgcctcagacgccaggaacgaaccgaggtgcagagcagcctcccatgtccggttacctgtagttccagcgtacagaatcacgccgcgcgattcagaggtcgtgacggtacgcttgggacaatttcccgcgctggatgttggcgctgtgtacttgactaacgacagctgctgcgcttgctgcagggctgaaggtttcggctgtgagactagtgtgctccagctttccatgagatcatcgttgatctcctgtatttgggggagatcagaggttagataggtggaatcaaggaatataaaagtgggttttggttttgtattggtgtgaggtggatgtatatgggatagcaaaggaaaagataggaagttcaaaatgcaaaatagcataatacaaacaggtggacaggcatacatcctcctcggggttgataattgattcctcgatgcgtgatataagctgtttcagcactcggcttcggtatctgtccggtgggacggggaagactgcattttcgttgaacatgcgctcgtatagagctgtttgcacagctggctgaatcagcacagggcctggtgggaggtccagttgctggagctcaaccagctggaagtattgcgccgctaatttatcaatagagtcggtcatgacggtcggatgaagactaatgaatgaatttgataccataggagatcgatattattggagcccggggaggagagtggatgagtcaggaatgagataagcaagggctgatcaatacattatgcctcaggcagaaaccgaattagtcatatacgcctgaggcaaatagctcaaacaggctagcgtctaccctagccgagcccacaccacacgaaaattgaaagttcgacatccccagtgaccccgtcgacacttcctccatccaacgcacacaccaaaatggccgactctcccgtcactctgcggactcgcaagttcatccgcaaccctctgcttgcccgcaagcagatggtcgtgtaagaacccccctgattttccccctcgtattggatctgtgtgtgggaaatgcatcgcaggcgcgcaatatggaaattcgacaaccacccagcacaagagaaagagaaagagaaatacaatcggaccgccgcaacacacacagaatcaagcatcgaaaacccaaaagccagaaaaccccgatctgacatcttttcgcgaatatctagggacgtcctccaccccaaccgccccaacgtctccaaggacgagctccgtgagaagctggccgatctgtacaagtccaacaaggaccaggtctccgtcttcggtttccgcacacagtacggtggtggcaagagcaccggcttcgctctggtctacgactcctccgaggccctcaagaagttcgagcctcactaccgtctcgtccgtatcggtgccgccaacaagatcgagaaggcttcccgccagcagcgtatgtctttctcttcgtctctgcgattatcaatcgcaaactatgatggcatgtgcatttttgctaacctcctcctacaggcaagcaacggaagaaccgttccaagaagttccgcggtatcgccaaggtcaagggccccaagaagagcaaggattaaacgcctcatctgtaactattcgcacgattcaacatggaccgatgatgcggcatggcgcgatgggaaagattatggcggtggcggctttggctctggagtttcccacctggttatggcttgtctggacccaggtgcggtcggtcgtgtgtggggggagtggtttatcttccttttcagcgaacatcagactaaaacccaaaatgatgcccgttgaatggtgaagatcgtggatactcttttttcttcctgtgcttgttggagctggtgattcccgagaaaaaaaaaaggcctgacgatccccatggaaatctaaaacagggcgtcagtgttgtggttctctgtttgtatgttttttggggaggggatcatcagtcttcgtgaagacggccagggttatgagaatccgggcttcggctgtttgcccgggatgaaattacattttacttgtttctcttcactcggtctggcggtcttgtagactggacttgtatacggggccatgatgtctagatctagtgtagttggatttccagactgtaaagtgaagaacctctgccgtgtagtcgaggcttggtctatatcaagccatgccctccacgttatatgcttcaaatgcggagtacatacttgacacaacggacggttgatatggtaacagttaaccaccttcttgcctacatcaatgaatgccactactatatcaatactaaaaccaaaaagagtgaaataatcatggcagccccttggccaaaagcccaatctaattcctcaagaaccaaatttcccagtaagcattctaatcaaatttcgttatttcggagataaaatctgggaaaatactccgccaaagcattagttaggttacataggcaacttgaaagttattgtccgaggcgctaaagccctaattcagagcgaagtctcacactataacagcgaaattgcatctgatcattgcctggacaatccaacacttgtgattaattgtgattatagtcatggcactaactaactagctaggtatttatcccatccagatatatttcgtaagaaaaagacgtacctagttactagttagaagagaaccagtctttctatccgactcaaaaaaaagagttaaaaagccatacatacaatgcaggaacaaacttcctaaaccaaaccatcacatctagcaatgacaaggcctcgaagcaacacaaaccagccggcgggaggctgtgtaagtatatccctcgggttagatcgcttgtacgatgggacagattacacaacctagaacgaattccctttcctgaaatattcccatttagatttcatttcccatatggaaataccacttattaattccacgtggacttgtttcgtccgggatactagtcgtctgactcgatatgtagatacgcatctgctaccgtaggatttccgagccaaggacccagacacgtccatgtcagggttgtatacggcattctgggttggatcattgtatcactgcatccaagccaagggcggaagtcaggagtccgtcgatgtacagatttatgtgctattttctggttaagaaggatctcggagggcacatgggcacatggatagccctagcccgtgcttgtgactgttgaggatgggggacacatggggatggggttaattataagtactgctttatcaggggatctgattgtattaggtgctaggttgagatataaatacttgagtaagttgtaaaagacattactttcgaatagaccgtagaaggcaaataaggaacacgcttggaaggattgctagaagacagaagactagaatcaacaagctctcccaagtcattcgtctggttgaaacacatatcacgggcagtggagagtttctcatagtaacaatagaaagtcatttcacgaaagactaaacacacatggcatgaaaacaaaagcatatttttgcaacagaaactgatccacagatatgaacactgcataaagccactcggtggtattagggagtaatcttgatgggtgtgacaggatggatatctcatcataatcccccattggatgttttttttcttcttttggatgaacacaggcaaaataaaaaaagaggacagaacgagcaataaaccaaaataggacagaaacatatttcataaacagacgcgagaaagacattaagtgtgggcggaaaaaaggcagatgtaaacggccttgatatgggtatctcttttgtgtatcttgtgggaaagaaagaaacgaccaagagaccgaccaggaaagagaataggaagcagcgaagaccaaagaataaacaatcaaagcccaagaattcgatgggcaagtataacagcgatacaatgacactaatgacatattgaactcaactcaatatgctccctgatgtcccagcggtggaacaggagaacgatggagactatcaagcgatcgcccataatcagacaaatcttcagctaaaaaatcacagggcagaccaaccgtcgagtccacatgtcgaacgcggttgtatggcaaaccattaacaagcgtcggccccgagcagcacacctcggtctcggcaaccctcgacttcctgcgatcaccgcccacatacccatacacatcggggctgcaattggaattcatcacgacaagacgacgtcctaagccgctatcacgggagaaattgcgtcccatacgtggatcggacgtgttgtactcgcccacgagagttccctctatcatttccagggccgggtaaggggggtttgcagcggagggggccatggagcatggggctaaaggaataggggagtggccgtccgcagttgacatggggacgtatccgaagaggccgggtgttcccgcgtctgagtcgcttgacttaatgcgtgttggggggttaacgttgtagacaccgtttcctgggatggtgtgcattggtactgtgcggccgtctggggagggtgcgtaccgcgagttccagctctttacgtctgaggctagggtcatacctgagaggccatctggcagggttgagaggttgatgtttggctgcagctggggttggcttcggcaggttgggggtgttgggagggtgcggtctacggcatccgtgtaggacactgtcaatgcccctgttgattggggcatgtcgggggatatgtcttggcctgagaggacgaagccatatgcagcatggttgctttgttcttcgaagaactcgccgttgggtctaccattgagatcccaggcgcggttgctccatgccgcggtgccatagtcgagcattgctcccgaaacgctaggcataatgtacccgtgcgatgtctggccatggtagtgggctgactgattgtcataaacgtggtccatgccgacgtgttgccgggagaagttggagtggatatccagctcgtattcttctcgctggtatggaacccgaatttgaggggagcccatgaggattgaccttcccccacccttggttccataaaatctagctgcttctctagcagcgtcttcgggggccaaagagttgacctatcaaaagaaaaccaggtcagtgtgactctttcgctgtagatattgtggactcaagactcactcgtatgtactggcattcggtagctccaacactacggcagctggagcaggcaagcccattgttgaggtcaccgttgcacttgatctttcgctttcggcatcgattgcactagtggaggagggttagaagtggccgggtgatcaagatggagagaacacttactgccactagggctcgctttctctgtttccgtggcttttcctctcgctctacgagagtactgcgctcctgtttggccacacgcattgaccgagccatggaaatggtcgagttgcgtcggacttggtctagtccgggcatgtggtcgtatgtgtgatccattgatatagcaaagaacaataacccgttcgctgctcagcagagtagagaagattcaaaggaaaagggcactgcgaatgcctataagtgtttatgaaaagaagaaatagaaaagtagagaatgaaggatgtctctgggaaatagggctagatttaagccatgttttggtaacaatcggtgtgattgattgccttccttttttttcataatatcgacatgatgcgatatttttgccccctgcctttttctctatctatgttttattattattctatatatgctggctgtgtgtttagatccatttgggtagagcgaagacatacaaagtacataggccaaaagtaccctggacctggtgtcttttcttttctttttccttttcttattccttatttctcactttttatttctcttattttaccatctcgtatctctattctattattctatttttttctaaggggaaaatgatatgcaaagttccgcttgcccagatttcccccagctacccccatatatgaaagacagaaaatgtccccggcgttttaaaaagaggtttcacaaggtaacgtcacacggacatgaccagacatgacgagaacaaagtgctccggtaggtagtgtttcagccaatttgaaggcttctttcttttcttttttttcgtcatgtctggaagaggaagtagtaagatcctcaaacttggtgtatctcatcttccaagagatagagaaaacgggcaactgccgagctactgtttgcagatactgcgggggagaatgtcccgacgtcccgtggaaaatgtttgctcgatagttctgtatagctgcaggtcaaaatagcccgttctgaactcggacatcgtcgaggtctggaacatatacctagtcttgctatcttgcaaacgcacgtcctagagaaataaataaaaaataatatcaaaaggagaacaaacgcctgtcttaggatgctccaaatgtctcaatagagaaagagaagagggggaaaaagaaaatataggcaaaatctctctcatgacacctgtcaactttgacaagcgcacgagttggccccgagccaagcgcgctctagaaaagtccagggatcaacgatcgaaaacgctgatcggcgacatggggggcgattcagcgttctttagcgcttccggcacgcagctagatcgaaatggaaggggggaaaaaagcaaatcaggcccataaaatgagaatagtccgctgtacttacccagtgtatgtaagtacgcttgtgttatccataccagatcttgatcatgatcgacgctaaagctaaagactaaaaggggatctagaagtactgaaatgcatgaacatctaggacacttgcaaggttcgcacattgctacttggagctgatgtggagagaaatgggtatgacatggggcagataattagaaggggtttctccaagattagtatagtaaaccctagttctaactcgtccaccttgagacattcggtgacaggacacgacaagagacatagagaaagagaaagagaaaccaaaaacagtggggaaggcaatcaaagtctgggtttcaaatacaaatctagacctggagtctccagcaggtgtttagacaagttccggcagttcaaggtttgacgatgcacgacatccggggggaagtaggaattgcgaagagttaggagaaacaagccctagctacgccagctgactctaagtcggctcgccaggaacatatgttgggattgagactggcttttgttgcagacgatacggtggaggcaacccctggctgctgaccgtagctgcctagatcgagagagggcaagtggctgggctgggtaagcggctgattcacgattgatcatatcctaccccacgtgtgtgcttcgttcccagaagttgatgtatggtcatagtgatgatacccgttggatcatgatgcaggaggccgcccgtttccccttcccaccgtttctgctgtggaacggctcacgggggaagctggtgctgtcctagtaataggaggaccgtgtacttcctgtggaagctgcgagacggtgccatgatcttagtggggaaagagatacataaaagacaagacagcacaacagggtgtggcttggtcttcccaggatttggccagtgacaagtcagttacttgccaagaagagatgcttcttttggttgggcctgctggtgcatgagggatataagcacgcaaacagttcaaacctagaatctcagaatcccagggtcgatcaaggcccttaataagatccgctgcacgtcgatctcaaaagcgtaaggttatatccattatggcccaacgcggacattcggaagatatgccgctcgattgacaagcatcgtttcacaagtctcccgggtcgatcatccggagagccctagagctgttgcgcagcacgcacccgtcggtagattcgtgcaagaatccttttattggaaaaatcgggagagaagagaaaagcaaagaaaagacaacactgcaagaggctcagttccctccggttggggatccccgcgggcggtgattggtcgaagctccgacgatcttctctcgtgcatttcgcatttctcgggcttttacattctctccctacacctcttcatacctctctcatttcgaaattagtttgccctccaaggttctcgtccaagcgcctaattcggtatcttacacccgattccccgccatgagcgcgctcttagagacctccctaggcgacattgtaattgacctgttggtcgatgatgcacccaaggcgtgtgacaagtgagtggctccattccttggctttcccagtctgctgaacctgaaactaagctcattttgtgtgcttttagcttcttgaagctatgcaagctcaagtactacaatttctcgcccatccatagcgtccaaaagaacttcaccttccagaccggcgacccgctcggccctgatgcacctgagagtgatggaggatcttcggtttggggtctgctggatggaccgtcgaaaagaacatttccgctccaggcgtcgcgcacgttgaaacacttggagcgcggcacggtgagtatggcgacggtaccggcgaagaacgaccccgaccaacggctagccgccagtcaattcatcattacacttggagacaatctagattatttagatggcaaggccgtgattttcggcaaggtcgtcgagggcttcgatgtcctagagaaaatcaatgagtccttcattgacgaccgaggtcgaccgctgaaggatattcgcatccgtcacaccactgtgcttgatgatccctttgatgacccaccgaatctagttgaaccacctgaaagcccggtgccctccaaggcccaattagccacggtcaggatcgcggacgatgaggacttggatgatgatatggatgaagaggctatggacaagctgcgtcgcgagcgtgaggctcgcgcgcaggcgctgacattggaaatggtgggagacttgccgttcgccgacgtcaagccgccagagaatattctttttgtctgcaagcttaacccggtcacacaaggtttgtcgcattcccacacggaaccgtgaaattatgctaaccgatgctagatgaggatctgaatcttattttcagccgctttggaactatattgtcttgcgaggtcattcgggacaagcgcactggtgacagtctacaatatgcctttattgaattcgaggaacagaaggcctgtgaacaggcctatttcaagatgcagggtgtattgattgatgatcaccggatacatgtggatttctcacagagtgtaagtgcacctcatcaccgctcatctcctccgaccaatatgctaatacatcccaggtatccaagttatccgaaagctggcgcaattccaccgtcaccaagcgccgacagagaggtggatttggtggtgttgccgaccttgaagcgaaacgacaataccgagagctagacgaggcgcccatagatgaggatgatgctagatatctgtttgacaaacgaaacaagaacaggggcgctccagctccgccccgcgaggctccgtcagaccgcactcgcggtcgtcgagatcgagggagtcgaagtccccgtcgtgaacaggatcgataccgtcgtcgatcctatagtcggagtccacagagggattcacgaagagattcacgaaaagaacgaagctacaatcatcgtggacgatagtagtcaaatatcccctattcaaataaacacaacttgcaccatacggagtacatatccactcaacttcgcccctgtaagccaaggccccgcttcagctagcctattaatttccagtgggcaggtctcactcggcgctcgctagcgactttcttgtatgggtagctcgttaatatttgcccttgtagatccctaaaaataaactggagcccactagacctcctaatagtctgggatatattattagcaaactggagtgtacggaggttcactaaaggtacttaatcagcttgagcttcaccccacgttttctaatttttagttacttttctccttccttctcttcctcattctcctcccaatttattctacttctctcaatctcaaaatatcctccaaaatggcaggcgtaatcaaagatgctatcaacaatgttcttggacacttccatggcaccactccagaggttccccgtgaaccctccgcggaagagttccaagcactacaaaagaaatacacagacgctggacaagggcatgtcttcacttttgtcgacgaattgacccccgtcgagaaatcacagctcttccaccagctgtccaactttgatcccgctcggatcaacgagctggccgacaaggccctcaaccctcctcctgccgagcagggaaccgtgaccctcgagcccctccccgaagtcgccacagcctccatcctcgactccgacccctcagatattcagcaatggtatgaagccggcctgaaggaggtggcagcgaacaaggtggccgtggtcttgatggctggtgggcagggtacccggctcggcagttctgcccccaagggctgcttcgatattggtttgctgagccagaagtccctattccagctgcaggctcagcgtattctcaagctgcagtctctcatcggcggtcaggatgtcgtcatcccttggtacattatgaccagtggtcctacacgcaaacccacagaggagttcttcgagaagaacaactacttcggtctcgacaagagcaatgttatgatcttcgagcagggtgttctgccttgtatctccaatgatggcaagattctgctcgagaccaagggcaaggtacgtagtatacaggcatagctcaaacgcgtgtaggaaatttgttgaccctgaaaataggccgctgtggctcctgatggaaacggtggaatctaccaggccctagtggtctccggtgtgcgggaggacatgcgccgtcgtggcatcgagcacatccacctctacggagtggacaactgccttgtcaaagtagctgacccagtattcattggctttgcagcctccaagaacgtcgacatcgcgaccaaggtggtgcgcaagcgcaatgctaccgagtccgtgggcctgatcctgttgaagaacggcaagcccgacgtggtcgagtactctgagattgacaaggagactgccgaggccaaggaccccaagcagcccgacgtcctcaagtaccgtgccgccaacattgtcaaccactactactccttccggttcctcgagtcgatcgagaactgggcgcatcagctgccccaccacgtggcacgcaagaagattgcctgtgtcgataccgcgactggtgacattgtcaagcctgagaagcctaacggcatcaagctggagcagttcgtctttgatgtgttccccatgacaccgctggataagtttgcctgccttgaggtgcaccgtcacgacgagttctcgcctttgaagaacgctcgtggtactggtgaggacgaccctgataccagccgcgcggatatcatggcccaaggccagcggtgggttgaggctgctggtgctattgtcattaccgatggcgaggccgttggtgttgaagtctctcctctgatcagctacgtatgtctctttttctctatatcatttccctggtcacaactaacatacattacagggcggcgagaacctggaattcctcaagggacgggaaattaaggcaccggctatcctggagcgggaagagtagatcagatgggatctaaccagtcggatctcgcggagatctcttttggaacgaagaaatgaattgcattgtgacactttttggagaatggatctactgaaagaatgtagggtaaggaattcgtagagtattcagagtactagtgttcaatatgagtagaacatagaggaggagatagaataccccgtacctacatacactagactgtgtatagaacgcctggagtagcaaagcgacgccttacgcaatacggaaaagcccgggagctaaagccgtttgacgagtttgtcctttttccacttttcctctcttctttgtgtgcattctcttatttaaaagaagttggagctgttgagagaggttattgaagttgttgagagtgtgagtttcttctatttcgtctttctgtctatttcttggctttttcttttctgtgtggttccctcgtgtcccacttttttttttcctcgagtgggctgtcagaacgtgcttgcttttctccaagggttctcaaaaagctgacaaaaagtgaccatttagatttttaccaggatttgaagagttaccgtgagggtgagtgagatctgagggtgtttattcgttcgccgagctcgtgctctcccccgccgatctacgtcttcccctctttcgcctgaaatttttgggattggcacgttatgcgattttgctggactcggacaacgtcggatataatatgcactggaattggagtccaaacaaggctcgacaacgcatgatggccagacaattcgactaccccggcaatgcaggggaagacgctgcttatcgacggagctataccaaaccataaacccggcaccgggctgacttgcgatggatagattaccgccagaatgatgttgtctcgtcgcgcatgctacaagtgtggcaccattggccactacgctggttagtatagctggagtgctatatctgggatcaaactaattcctcggtagaggtctgctcttccaccgagcgtctctgctataactgtgcgtgaatatctccccgagaggtcataaccttatcttacttggcgctaatttgttttatctcataggcaagcagcccggtatgttcaaccatgagtcataatactcaaaacaagcttctaagtcttcatataggccacgagtcgagcgcctgccctctgccccgtaccaccgagagtaagcgatcactcaatatcaactgtgctgccatcgcaggttgctaacaccatctagccaagcagtgctataactgccagggcctcggtcacgtccaggctgactgccctaccctgcgcctgaatggtggtgccaacagccgctgctacaactgcagccagcccggccaccttgccgtaagtttcatcccctaagcccaggtctgcaacctttgaggcggttactaactctactccagcgcaactgccccaaccccactgctcccggagctggtgctccccctaccggtcccgccgctggccgcggtgccggtggtgctcgtggcggtttccagggtggattccgcggtggattcagtggctacccccgcgccgcaacctgctacaagtgcggtggtcccaaccacttcgcacgtgactgccaggctcaggccatgaagtgctacgcctgcggcaagctcggccacatctcgcgtgactgcaccgcgcccaacggtggtcccctcagctccgccggtaaggtctgctacaagtgcgcccaggccggccacatctcccgcgactgccctaccaacgagggtgccgctgctcctctcgctgccgttgaggttacacccgttgctgctacccccgttgtggctgcccctgctgtggtcgctgttgagactgtcactgaggctaacgtccctactgcggctcctactactgcagtcgcttaagtgtgttcggtcctatctctccaccgtgcatttgctattgaagcaatgcctggagttccttttcttccttgattctgtactacggtcactttccctacacctcgatcggtcctttctctccgccttttcttcctttgcatatatttaaatcacaccccttgttttgggaacgaggtctggttctggaccttaaaaaacaacagcttttgatttccttttttcacccccttttggacgtttggaactcgttctttttttacttatttttttttatcaccctatcatgtatacgacgaacaaacagaaaaggttgtttttgtttttcgcgaagccctcgacttgatttctcaagtcttaacgattggcgtctgttgtctattctcatggattatctttcttggttttcgattgactcttggttgtggttttcccgaatggggccaaggagagaacgaggagatgaagtgtggcaatgagaggatatgttgaagctgaggggaattggattcggagaccgttgcaactggaaagaaagagagcttccagatgagaagagtcctgagaatatttcgagaaaaaaaaaggaaatgtctcaatcaccttgttcttgtagtgtatagatgtagtgcgctctgtgcttagtagctgtctaaacccgtgaccttgatcacccaggtcgagtcttttacacctcttgttcactctacaatctaccccatcagtcagcttcagatagccatccccaattgatccacatcaagatgccgggctcggttggaagtgatgaattcgacgatgacgaggtacagtaatcctcatacccacgcacgtcctagagctgccatctaaccaataaatgatctacaattgcaggccttcattctggacatcgacggcatccaggcccacggcattggcgcagccgacattaccaagctgaaggccaatggattctacactgttgctgtcagtcctcatcttcgcatagttcaagccaattccatccccaaacctaaccactcatccagtccgtccacggcgccacccgcaaaaccctcctaaagatcaaaggattcagtgaagtcaaggtcgagaaagtcaaagaagcaattcagaaatgcctccccacggcctcgggtttcatcacagcaatggaactccatcaccagcgcaagaaagtggtccgtatctcaaccggcagcaaacaattcgattcaatcctcaacgggtgagtgcaataccaatgcccctgtcaaactccatctaacccaatctaaccccaccagtggcttccaaagcatgagcatcagcgaagtcttcggcgaattccgctgcggcaaaacgcaactctcgcatacgatgtccgtaatcgcccaactacccaaggaagcaggcggggcctccggtagagtcgcctacattgacacagagggcacgttccgacctgagcgtattgcccaaatcgcagagcgattcggaatggaccccgacacggcgcaggagaatatttcctatgcgcgcgcgctgaacagcgagcaccaactcgagctgctgaacacgctttctcaggcgtttgcgggtggcgagtatcggttgcttgttatcgatagtatcatgaactgttttcgggttgattattgtgggcgtggagagttggcggatcggcagcagaagttgaatcagtttttgatgaagctggcgcatatggctgaaggtgggttgttttatatgtgtctttgctcttttggctgctttgctgattggtctgacttgcagagttcaatgtttgtgtcttgatggtgagtgcgatattttgtttctcgaggtcttgtggctcacgcttcagttcagacaaaccaagtccagagtgaccctggcgctagtgctctctttgctggagctgatggtcgcaagcccgttggtggacatgttcttgctcatgcttccactactcgtgtgctccttcggaagggtcgtggtgaagagcgagttgcgaagatccaggattctcctggtgagtacttcgatatagtccgggtgctaccactgttctaactttttctaagactgcgctgagcgtgaagcaatctatatcattaccaatggtgggatcaatgatcctgacaaggcttgagggtagggtcgagacgatgtatcgatgttgagggaaatgctctgcagtcacgattttcatgagatttcgtgatatctcaggttttattctgtggtgattttataccattaatcaatttataccatagagaataggttagaataccaactccaagttatgttcatgtcgatgtagttgaagccctaactaagaaattcaccgcctacaccgccgctctgacatcccggcaaaattctgtgccaagagcaaatctgcagaaaaagttcagctcaatcaacgcaacaatccagcgtcaaacctccattcaaaatgaagggcgaatccgtgcaggtagaagggtataccaccctacctgtgcagctcccaacaacccccctcttcccctatcctgcaacacactatctctacatccgaccacacgaaccccgaatcccagacccagattccacccgctccctcttcatcgtcaacgtcccaatcgacaccacagaagtccaccttcgacacctcttcggtgcgcaactcgccgcaggccgcgttgaaaaagtccaattcgaagatgtgcagaccaaaaagcgcacagcggtaacaaccacagaaaccaacctaactcaaaccaaaaagaagcgcaagcgcgtaactgccgatgactttgaacgccacctagacgacatcacgctcccttcaacctgggatcgcaaacttcaaaagagcggcgcccacgcagtcgtcatcttcgccgacaagcccagcatggagaccagcctgaaagccgccacgaaggcggccaagcggggcaccaccatcatctggggcgacagcctgccgaccaaccgcatccctgtcctcgggctaaaccggtacatcgcgcacgagcggatgcagtaccctgatcgggggacgctgctgcgggcggtgaatgagttcatgaccacgttcactcaggtgtctgaggtgcgcaagcgcgaggatcacaagcgtcttgctgtgccggacgaggatggattcgttactgtttcgcacgggccgaagttgaattctgcggcgagggaggaggagatgaaagagcttgttgagaagcagaagaagaaggctgagggactcgaggacttttatcggttccagtccagggagaagaggaaggagagacagaaccagttgcttaggcgctttgacgaggataagaagaagttggcggagattaaggcccggaaggggaagattcgagtaagttttctcttctttgttcacttgctccttggtccttgaggttttactgactttttatacagcctgagtaatctgttacatgatagcatggcgttatgggtgtcttttttcgctggcaagctaaaaggttcgagaggtgtcctatgtacatgtgagtttttaccttttctttgccttcttttatgctcgctcctatgatgaactcgctggggccatagtagcgaaacgcgtttgcccgctgttatgccatgactgcaaacaccagcatatctatatcttctcgccttctgaactggaatttcgtcttaccgggatttattgtgcttcttggtgtcgcatctgctaattgtgattcgaaacaggttcgatacatacatacctgttaccccaatatcaatagttcatgacccaattatatatgttcgagttttcgtatcatccatagccaactcgtagatgtctctaattccggatctcccgcacagaccaacgcttggcgttacatcccacctctgggaaacaggacgtcttatgggattgatagctctgccaaagtatagaactgtttaaaaacatcggagaataatggctacagtcagctgtattatttgatactactttcggcaaagtcacgttctccaagcctgtggcaaaagcttcacacgatatatcccgcatgatatatccagcaaaaatagctctatctcagtggcatacagcacctcatcggccattcttcgctcttttttcataaaacccccatcaagagtgagaatcttaatcattgaatctggcacattctatctatatcgaaagaaagccacaagatgtcccctgcctcagtcaaaaatgagcaagacagcgactccgactccgacgtcgagttcgaggatgtcccaatctccctcccaaacagacccagaaacagagaagacagaggaatcccgataaccatccccgcaaccccgcaaccacaatggactccaaccctatcactcccgccacagcgaagccaacccatcccctcgggctccgaggaagaagtccagctccgaggccacatcagcaccggcatagagagagtcacgtaccgcaaaatgaaatccgacatgggtatggacgcaccgggtacgcccgcctcagaacgcaggtataatggcttcaaagagctcgctgcagatgtggagggtcttattgatgcgctttgggcgtcggcaacacgtgagttttatatcttatacaacgtagaagtggattatattgttttatactatctttattgccttcctttttgacaccatctgctacattctaaccaattctgcccagcggcaatccaaaccgaagccctcataaccctagcaggcctaacccaaacctccctcccagccttccccttcgatgccccaccgactctaaacatcctatacaagctcgattccgtcttcgcagcactatgtacaggcacacacccactcaccggcgccgttctaccaggtgcacagctgggccactctctcgtgaccgagacgcagaaggttcggatccggagtttggcggagaggactagatatgaagtgttctcttgtttggagaagtcgaaagatggagttaatgctggtactgttaatactggcgggtatggatatggggatgacgaggacgaggatagtggcgacgaggtcgagccgtggatgttagaggccacgcgggtttatgagaagagtcttatgttgcttgcggagcaggatcccgaggtggacgcggggatggatgagttcaactgtttgtaatgtatattcaatcttgttgcctgatctaggtgtgcctatgcggctccaacattaaatagatgttggtgaagatgatatttttagaatggatctcttgccattacgtcggtgtacatatggtgcatacgaggcagacgctcaggccacacacaaaatagtgaccaagtagttcggagcacgtcccacaccaatttgcattacatacggcctctattgtcctaacattactacctatggacgcggatatttctagaaacttctagctaatgaaagaaaaaaatctgcaccgaaaaataaaaaacaaagagcctgtggggtccaggcaaaaaagtcggtcgattttattcactatacaaatgccgattggatcggtaatgaagtaatgaggtttacagtaagagttcccgtacctcgaattcaggtatcagtcacacccagtgttagcactctctttggccagaacagagcgaactaagtggatgtgagccctgaaagtgggggtcattggggccagctagtggcctgggtctgtgtagctcggggctgcaatggccagtagtaagtccgagaggctatagtttagatgtacatcgtgaatatacgatttcgttggctgtgctttgacctggccttttttgccacgtgaaagcgaagaaagtggtaactgtgtcatgacagaggggatataccaatagttgtatgtgcatatgctttggatgatatttccgatggtgggaacgagctgctttgtttccatggttcatactgtatattcaggtataatatgagattgtgttactgaactgagctataactagatatatattgtgggatgatgttgtagctgcctatataggtcgtttgcttagggctatactattccgtacaacaagaccagtttgccgtgtcttaccatgcaagggttggattagcttattttcatagagctgagcaggtgaacggaggggttagatctgaaacctaacatcccaccttaatgaatatcatcccttgcacgcaaccccttccacagtataaaacatacaatagagtaacatggtcgaaaccatgtcagtagagcatggttatgggtaattcaatcttagaaacgcgtcgcgtaccgcgtagagtgaaataagccaagcagatgaaatctctgctggtaaagcagtaattccaatacgagcggccccccaatcctggccaataagagcagaactttgcatggaaagtctcccatggttctgatggagcctttttttttctttctttctctttgatgtcttttttcctggtcctgttctttcatgaccggacgtgcgcggctgaggtattttgggaatacgaaggggaggaaaccagattgggaagtccttgcgtgcagcttagggcagtacaggacatggattagagaaccttgcttcgagaagattggattgggggctctctgtgacctctggtagaccttcagctccagggctgcagacagggtatctgggtgaccttgctgtattgtggaaatggaattaccgtacggggctgctggttccatggttctgtggcgtttgttctcttccaaggtttgtcttgcttattatgatattacatacagtagatcgggtgtggacatgctactagacaccatcatgtctatatccatgaacaccttagtatagccctagttttgcatataatacaagagatcagatcaaaccactgcctatgctaagatgtacggagtacccaacaggttactacctgatctgcttgtactcttactcagcatatgacgatgacgagggctcgggagaggcccacacagacctgaggagttgacaagtcacattgcgagggcggcgacaggtccttgcagatttcatgcattggggcttccggccccttgttcttctggctttcaccgaattttgttcacatttcttttttttttttccctgtggctgatcatgcggacaggtggaagaggtcgatcatcggcaacgaactttggatgcagacctcgggtcccagggtatgatgtatcatcttcaattctcccgggcttcccgggattctggtacgatgaagaatagtaagccccccgcatgactgatatcatgcatttttgacaggaatctggggacaggctggtatatataagtattctgtacggcgtacggagtagggtttgtacctgcctcaggtcaagagaggaaagagctctgatcgacaaaggcaaggcattctgcactaccggctacagtgtacaactagtagatatcatactgttgatactgatctatacacgcagttggatactagactcgacctactctgtactatttagtatgttgttggcgacatacttcaactctggaacggaacataccaataccctgtaatacacttaccataccgagactcacgtaatgcgtttcccacttcccctctctcttcatctcgcgagatttccaattcttcattttcttcttttccccctcctaccttcccctcccttttcttattgttcgaagatctcggtttcaattttctgtttagttatcgggagttctgcttttcctcccttgttgccgattactctttttttgcctcgcgcatttccagtgttttcccaggttttcctcaacatctaggtaagttgcttggtgttattctatcgcatgtcgcatcttggccccaagcctctttcctcgtttgaatgtaccccaaattctgtctgccccatatctatcagcagtccggcgcagcgcagcgcaaattagccctagatcgcaagcttctttgcagggttcacgattttagtatggcgacgccttcgccttgaccagcgcttcgggacatttgagccgattatccaccggtcgcacgcatctcaacctcaaaaacgtcgccaatatgaggaatcggtccgatctggatgtctgacttgcccgaaaactgtgctggattgagagggtggacggtcgcattcggacatgaaaccgggacgacggaaacggccgacgcatgatgatcgcctagcacccgagtggaagcaagtccattttcgtctcgcgcatccgattttcgccgttggattgttcgtcttcggcgactcctcaaagctagcatcgtgagatgcgatgcttcccgaagcactagtcttggcgatttccggcaccactttttttgaggctcagaatcatatatacgcccgaggaaccagccgcaaaaatgctgactacgcacttttttttcccttccgcatcgtttactcacttgcattgcttggttgcctttctctgctattcacctctcacttccttttctttactcgcgcatatgcagatctgcttcaatttcattgaaaattgatataatctgactttatatcttccctagcttttcacgcccgtctctttgcttggcttcgttacgacttgatctcacgccggtctttctttaacgactccacgaagttctagtcgctcagacatcttatattcttacgtcgactttccggactttgatcttgcaaccatgtcttacaacggctacgaaaacttccctcagcaggatcccgccgctgctggcgccccggctcccgttgacaccaacatgaccggccaggccgatccctccgccgctcagttccagggcccccctcctggtgagcccaactccgctcccgtcccccagcagggtgccgatggcaagaccaccctctggatgggtgagctcgagccctggatcgacgagaacttcatccgcaacctttggttccagatgggtgagcaggtcaacgtcaagatgatccgtgacaagttctctgggtaagactgcaattagaactttcatcccaaaattgtttctaatgtgggtagtaggagcaatgccggatactgtttcgtcgacttcgcttcccctgccgccgctgctaaggctctttccctgaacggaacccccatgcctaacaccaaccgcgtcttcaagctcaactgggcgaccggtggcggccttgctgatcgcaggtaagcgatgatctctttggttggttgcctcccggctctaaaaaactgacccgtcccagccgtgatgaccgtggccccgagtactcgatcttcgttggcgacctcggccccgaggtgaacgaatacgtcctcgtctccctcttccagagccgcttcccctcttgcaagtctgccaagatcatgaccgaccctatcagcggcatgtcccgcggttacggcttcgttcgcttctccgatgagaacgaccagcagcgtgctcttaccgagatgcagggtgtctactgtggcaaccgccccatgcgtatctccaccgctacccccaagaacaagggtcctggtgtcggtggtaacggcggtgccgccatgggtatgcccggtcccgctggcatgtaccctcccatgggtggccctcccatgcccttctacggtgctccccagcctatgaatcagtttacagaccccaacaacaccaccgtcttcgtcggtggtctgtccggctacgttaccgaggatgagctccgttctttcttccagggcttcggagaaatcacctacgtcaagatcccccccggaaagggttgtggtttcgtccaattcgtgcagcgccacgccgctgagatggctatcaaccagatgcagggctaccccatcggcaactcccgcgtgcgtctgagctggggccgctcccagaacaactccggccccgccggcagcccctaccgccctgctcccccgccgcctcccatgtacccctccatgggcatgcccccaacccaccagtatggcgggtttgcccccatgaaggtgagcgatcaccctggcagcccgatcccggatcaaatgtgaagcaggcggtcggctgacacactcttccagtaagcgtttccctttgattgaaagcaccagcaggagttatttgtgtcattccaacgatgattctattgtgtcataacaaattcgttccttggtttctgggccaaggctatagctcttgatgagcatttgtctcctgtgctacgcatttcctttttacgtgagcgctattaccttagcaagatctgagctttatcccctttctgatctgtcttgttcttatgtatctttccttttttcaccctctcttcgactctccccctttgcgccccgtcgtattttatttttctttatcttattttcgatgtgtctctgcccttatgctatttatgctatctgggtttcccgccactgggtctttgtctgcgtgtaatggaagtccgaattgtcctgcgcttctttttcccttatactccttgggcaggcattctgcgaaaagttccatttcccccaccgttaccacttttaccaccttatttcatttgttcctttttttttctttttttttttcttttcttcaagcagctaaattgaattattgttcgctttgagaatcttcgcgtcgtgcttctttttacccttgtttcttgttaagactgattgccggcttgtacaacacgctttttttcgtgcgcctcagcgtttgtcgattctaaattcctttgatcgtatgcaataatgtcctgtacgcttgtctggtattttgcattgcactactgccttcaagctctccatttcctggtattgtattgtcggcccttggcttctggatctacctataaacattgctcctgtggctggtcccataggtggaggtttcaatggactcgagcatatctggttgctctgttagctggtccctggtggttgtcttgctatattgctgtctgctgtctgctatcttgagagtctactgggttagggctgggatttggactggactgactctgagactactcttctggatcattgtaaatttcttaattcctgaatggaatgtatataggtatggctcttctatctttttttaatgcttgatattcgccggatgaccattggcaagtggacctcggaactgtacaatactcacatatatgaagtctacatacatccatacatgtacatagaaacattgggtgtacacctccagacgtcttatcaatatgtctatcgataagcatactgcctaccattatcgatgctataggagtgctactcaaggcaacaacgaccgtgttgattgtataccgccttgcacgacttcccataatttgtatacaccacccaagcaacttcgagatgatcagtccatccattctctttttaccactctccacagcatcatgcgctacagaaactgggatgtccttcttttccctggggcttcgaaggcccccatccaagagttcaagacacaatgttttgtgaccaaggacaaagactcgccctatctacagaatgctgtcttccttggccctcatgcacaccatcccgagccaggtgtttttaaccagctgccagtcctcacaacattcatcccaagtctacccaaagacagtccgttccaagtctcagttcacagttgggagaagccacgtcccagtgtccagattgagtccaatatggaaccagaggacgttttgctgttcgaggcacgggtcttcgttgatggggtctttgttgcgtgagtaacttacgatctatgtactctgatgcttggattaagctgatgtcttgcaggggtagtatctatccacagagaactagttggccacaggttatgggtatgttgcgcgcgcttgcttcggcacaacgcagttctaatatccccattgccttgcttggttttattattgaatagctactgacattcatttgccagatctgggctctagtatgcgattccttctttccctttgatttcaaattctcacagtccgaacagatcttgatcgagatggaaaccaagatgtccttcgatttcctcccttccatcctgagatactacaacagaagcattgggatgccggggattctcaaggtcgaatcaaggttatcatcgcagaaggtttctctcgccccaaccgctcacccccgttcgaacgatacaagcatgtcattgctttctctttccagcatgcaccactagatgtgctggaattctctgacattgcttggcccaatcccaacatgtggcttgctatgccgaacgcatcccggtatggatcggcggccagatatagtacccccagggcagttggcgatggcgcacatgggcattcgccaagcaaacctagcagatccgatcatcgaagtacgattacggccaacacgagcagccaatctagcagcaatgcagctacttacagcggtagtaccgcatcaacttacaatgcctggacccctcaccgtgggtttcccattccttccacacaatggaacggctatccacaagaacctcgatgggagccacaggaaacatacatcgtggaacctgtcatagacgccttcgttgatgatacagcttggcgacagcgtggtgctcgatcctctcgcgaggacatcccaatgccagactatacttccacgggatcgaacagcagccgggccatctccagcatgactgggatgagctacgaacacagcaagcagcccagcatcaattcatgtcttgacgatgagcaatacaatgagctgattgaagctctgacaccaacgaaggctcctccaatgggtacgcgcgcaccatctaatactccatccgctgtcgccgccgcgacatctgcctcaaagccttctgctgcagccgaagctcgatctgcaagctacaagacccgaagccgccgtgcatccgcactcagggagatttcacagtcaagcacccgtgatgtttcgggatcgagcgagcccaagaagaacttgactccatccaagatcggggcgtgtccaagcgagaaggtccggagcaaaaaggagacccagaaagaggccagccaggagacccctaaagcgcagtctaagggtaagtgtaaggggattgcgaacgaaaacagcaactccagggatgtcgagaatctacaggacgagaatgagtcggttttgtaggatcgcactggccatgatcatgatgcttttcagcttatacttacctaatcattcatttgttttagttcagtgacatgaagccggcatgtatcttttatgcgagcttcaaccaatgcactttttactacgaagtcgacaaatgtactgttttataaaaacttcaatcgataattttaccctatttcaagctgacaagtatactttattcgaatttggactaacactagttactatcacgaagagtctttatccggatctcgagcaataattcttccactatatgaagtactgttttatgcatgcaattcctgtactactgctactacttattcacacatgatataacaatagcagtagtatggtattggatacctggcattacatggtgtcataaggcggtttcaaacttcgtgccttctcaactgccttctcaactgcttgtttggtatgaagagtcactctaccaggcgactgtaaagtgacttcgctctctttcttcccctccctctctctcttccctatcatcgcctcttttcccatcttcgttcttcgctgccacacgtctcttcttcaccgcatcatatcttctctctttattgttcatgaacaccacggaccacaatatccagccaggataaggctgttcctggggtgtcccaggccaccaggcacccttcattcattactttcttcaggctcatcaccatgatgactgtcgcggtgtgtcctttagcataaatacatcactcaatacattcaaatttggattgggaggttctacttgattgcaaatgtaagaagaactctttcaaaacacgtagttggctatatagcattttgcactattcttgctacaacaccaataatggagggaaatatctcgaatacatacaaaaagaatatccggggagacatctcgggagactccaaaaaggtcttccaaggacgcgttataattgaccactttggcatgttccatagcataaagaccattaaaggcgcttgaactatcaagttcgaagtatttccctttgcttaatcaaataatatcaacaattctcaaaaaaaagagctatcgatggacaagtctagtgagagttcaaacaaatgttatgctcgtattgaactaccttcaacaccagagcctctataatgataatttcactacaaaaggaactcaaataaggaaaatatgattgattaagcttcattctatctaaagccagggagctgtccctagcgaaatggttcaaaaaagctttcagagacaggacaagcaagtgggggtcctacttgcatagtgtaagtatccgtctcatgacaagcgagattcaaagtacaatgaatcaagcttttaaaaatgccctcagagttctcttcatcgagcaagtaaccagagtgctgtctctgatggaaaagttccaaagatttgggttttgatggcgtctgtggccacccaaggattcagagaatccatgcatgtagtaggccctcagaattgtgtcttccttggaaccctgccctgtatcctccgcgcctcctttcctataccctccgcctcccatctcgtagaactttgtcataaccccggtgggtgactgttctatatcctccccctgtctgccatcggagtcctcctcctctgggacgaggccacgccgggtctcagatagcccatccttcactcccccaaagacgtgattcactttcgcgcagtcagaggtcaagataccctcagagtcctcttcactgggcaaggtcacatgtccactggaaggctgtgtcgaatgctgcttccagtgggaggccaggggaatggttgacggagggacctgtgaaaggggcaatttctgctatatatcgtctcatgagtacgcggggacttaccaatggccttttgtgagacacagaagactcacggccccgttgaggcatgcaagtgttagtgttggagagtgtaattggggagagaccgggacagaaaagactccagcctgaattccatgaacttcaggtgtgatagagagaacagcaaaaaacgcatgtctcgaaaatgaaaaatatagaagatgaaaacagacaaagtatgttcttcacaggagaggaaagaggaaagaggaaagaggaaagaggatgggatgggatgggtgatgaatggaggggggaagagaagaggaagagtagagagggaggtttgacaagggaagatgagagggaggagaaaaaagaaggaggaaggattttatatcagaagcctggcccgtccgactcccaattagggaaagtagcattatagcctcgcctactcccaatacagtacaacgatgacatggtgactgcgtattagacaatacctggagactgccaccttgaatcgacagctcatataggaattaaaatctgcattgtgaccaggccactaaattgacttgacttatactatcactatcatgccagcaggctgtctacatgtacacaaactccaagactggtggacggaggaaactatccatgtatgagttcgaatcaatattttgagaccaggaaaataacatgaaataaccataacgacatcgaaactcctggaatttgctaacagggaatatccaaatccaatatcaatccggtctcatcccatcaacacactaacaccgacagccacaagtagagtcgcgaaattcctagttcttttggttcctttttagatcagtgccatttttcctctggtcactcctatgtccggtttcagggataatatgggctggtcgggtggtacccgggtctgatctcaagagtataggcaaagtgtaaagagaagagaagaaaaagagaaaagaaaagagaaccacaggctatatagccagtgtgatagaagtagaggtagaaaaggcccactaccagtaatactggtgacaaaagagaaagggaaggaaaaaaagggggaaacggccggcatttgttggaagattgttcgagattgatcaaacgagagaagatgagtgacagaaaaaaaggaaatcgttggaaatgaaagtatgaaagtgcactggatcaaccgtagggaactggacttcatactgagaggtatcaacgttgcccgtacagacaaagccaagcaaggaattaagtaaccacatccacaagtaaaataatagtaataatagaaagaaaggaagagaagccaagaaaactcgtaggtcacagtgcactaatctcgaatacagaagagccccggccagaccaagcagtccctgctatcagttgaaggatgctggtttcctaggacgagcaagggaggggataggagaggatgcgatgaacaaggtacaccaacgccaatctcacgacagcacatgcgcagaaaacacatatccagataattgagagacaagaagaaaacataacaggtcgagtatccgcgaaaacgcactagagcaatgatcaaatgtacaaacaagggtatatcggaggtgaagcacctgaaggaccgttaagacttttacacgttcacaggccgtcaccagcacctgtttcaacaccatcggccgaataggacatgctgggatcgaacccaaatccagtagtgtcggcggcatccgtgttgaggaatgtgtcaaagtcaaagtgctccaggatgtttgggctttccagtgggccgaagtcgaggttgtatggcttgcatggagtcagtaaatgcatacttgtaggagacgaggtggaagaacatacatcaggaatactgaggtcagcgaaggattgctgttggtcagggggtggctgcaccatggtctgaggagcaggtgccgaggtcggctgtgatggttgagcttgcccgttcgctccattcgctccattcttgggattgaaagaattagggtgctgcggcgtgacgggggtcgatggagtcggtagctctgcagcttcggtggatggagttgcacctgcggctgcactggcagcagcagcagcagcttgcttcttgttaggtcgcttggatcaagttagcgaatgcaaagaccatagcaccaattgagagtatacaaaccttgcgggcgtccttggtttccttcttgcctttcggtgcagctttggtggcctgctgaggtgttggtggcgcgttcccagccgtctgcggtgacgctggctggccacgaccaacgttaggacccgtgacaggtggcgccgagggcggaggcatcgcgcttcgttcctgtggggtcccagcctggggctggttcgcaggtgaatgctgcggaggcatctgcggttgtcctggctgccattgtccactaggcatacgctggccggcattggccggaatcggctgacccatttgagctccagtgaaagcagggttagagctaggaggtcgcatattcgatccagggaagaactgagcccccatctctagtatcggaccaccgttgaggttcatggatccaggtgatccacgttgagacatgtcaccggcatttggcgacccgggaagtccagtcggaggtatcttgggcgtacctcgtttcatttggtcattaggattgggggatgtgcccgccctgctgcccggggaagcgcctggcggtaatattccttggccgggcatcgggggctggccgtcagaccgggcaatgctatcttgctcttgacgagccatcatcaagcggcgcttattctgctgttcaagcagcataagctgcatttgataatcttgaagagcatggttaccatgctgagtgccaggtgtctgtaaactaccgggtcggacctgggcgagttgaccgttcgcaccgtagtaatcaggaccaccagccataggatacattccttggccatccggcatcggcatcagatccgtctgattcgccattacaccgggattcatcatgccaccattcgggataccctgggaattcgatgctgagcgagagtgatgaagggccaagttttgagcatatacctgcatagatttctgttgcgcagcttgtccctggaactgctgaaattgggctggagtcattcccctctgcattccattctgcattccattctgcatcattatagcctgcgggttgggctgtccaggcattccttgtccctgtccacggccattcggtgccagctgctgtccgttgacagcgccttcaaggcgtgggcgtttcgacggcgaaggagcgttgtcggcagacgctggtgactgtggtcgatgtccacccatctccatatccggatcccgttgcatttgctgcatcatctgcaagtgctgggtcttttgatactgcgccagttgttgttgttgcgagctagaaataatctcatcagcacgtccacccccaactcaacagttcgcataggcaaggagatattcagatagagcatacagtccagtggtgttgttctgcagcactgttttctgcaggttaggaggcaccatgccattctgtctccggagctggttcatctggccgggcatcatgggttgctgcctcataaattgattgtgctgttgctctcgcagacgcataaagttctaaatttcaggattagtccatgatcaacatccccgaaggtgatcgactacgcacctggttgtgctgaagatattgcctaatatcactgctgtttcccttcttgcgttgagcccagaagaactcccaaaaaaggctgaaccaatcgaggaggaatgaggaggcactttcgttgggaagatttggacgagggagatcatctgggattttgatcttctcaccgtccttcccatcggtcatcatggcatcggggtccataccattgacatcaccatcacgccgatttccgggactcgtcttggggttgttgtcggtgttgagtttgatggattcatcttgcaagagagcgcgggcgcagtcatggtacccacgtttcaaaaagtaatcatagatatacgtgttgaggttgttgaccaagacttcggggttgttcatagcgccgtcgtttcgagaagccgtggatccgttgttgatcataggaactccacccacagggcccccagccccggggttcatcccgacgttcatttggttcatggtggcgaacggtgggactgcagccacccttgcctgcggtatcgtgagattttcaaatcggagatatgtaatttccgacgcgcgacctccgtttcaggctatcaagcctaacgcggggtgatagaagcgacgcgtggaaatggaggcggaagcaaagcgctgaccgctttcgaatgaatatccaagcctcgcaggctgagcaacgcgtgtgcgtaacggcgcaaaagaaacgggtatattatcgcagaatatgaggaatttcaagatcaccggtggcgtcttttcccgaagaaaccacgcgacagggtagaaacgagaggatggaggctcggaggcgcagatgtagtatgttcggtgtgtctctgactggagaaattgatgagcgcttgccagagcattaaacacttcaaacgaccaagtgcaagagtaagtgcgcagtctatacggggtggacgatgacggaggtacaaggaggcggaaaaagcgcacaagtgaggtggttggtatggggggcggcgccagacacccgatcgggcagaatcgcggataggagagtaccaaggccgtgtacaaagaaagagaaaacccaaggacaagaaacgaaaaaagggaacggattaagaatagaaaaggggagtctaagatatgtggatctcacagtgggaagatgaggacgggttcagtgagagagagccggggggacgtacattgacaggcgctgccctctgcgggagaatcgcttgttcggagcggatcaacctgatcggaggtcggggctggggatggcgctgtcaagcgtatttctgggaatgcaccgatctgataaccattgaatttgcggtcttcgacaaaggagaaacgggagtcaaggaattagcgaaatagaaatggggatagatatggaaatatggcgatttgaagagatcgagaagaataaaaaaaagggacgaaggaagggaaagtcagaagggtgatatgatacctgatgggccctgcgatggatcccagcgggagtctaaaaagtagggtaagccactatttcgcgaccaccacaaaggttagatatatcgaagatcgagcgatcgtagagaactgaacaaatcgattgaagaatcaattgctgtggaaaagtcgtgcctaggtagaggttgaagaaaagatggaaaggagggaaattcgatctgtaaagagttgaggggcggcggagatagtggtacggaaccggtatggcctcgcgtttgtgacatacagtacgtgacaaatacactgactcggatgttccgttgaccgctatttaggtgcccacgggaatttgtatgtactgagccgaactgcaggtttacgctgcaatacgtgtttggtaaaaaccatacagatcgagctcctgagcggcagattcgccaaggatctacacgtataaaaaagggaaaagggagatcatgcgatttcgatgaactgatcgcaacatgatctcaaaccttgccccaagcccggttctgctcagttcgaagttaactgtcagccccctatgccagtgataaatcgtgtggttcagcgcaggatacatcacaaagcctaatttgttgaaagacaggtgtacaaatagagtgattatcagaagcaataatgacgagtaagggcaaaatgaccaatccccctaaaaaagacataaccagtgaggaaccccagaacgcccattcttcaagtagtgtaaatgcacaagatctcacaaggtcattactcttcctccggtggcatctcatcctcgatgtatcgtacaagggagacccgcatctccgtggtatcatctccgcgtagcacgtcactgacaaagtgtgcctcgatctgcatttgaacctaaaagccgggtcagtgatcggacccgtaacaagggaacctaatccaattgaccacttaccatctccagggaccctcggaggacgccacacagaatgttagagaaccatagctcgtcctgagcccgcccatcatcgggaagctccacaaagtccgccaaagggttgtcttcaaaaataagggagaactgggtgttgtcactagtccagtttgtgactgtaggtgtgacgttcagaaagatcttgaagccaacctgatcggattgtcagccatcagagatacattgtctccatgtactaaagtaactcctaccttcgcgatcatatcagctgtctcccggaagttgacgcaacggccgacacctgacttggccaggaagtcttcaatgagtcgcattccaatattgtatcccatcttgtccaactgcttgttgacatcgtgatagttgctatcatagtcttggcataattgcgcgacaattgttccgtaggttaatgtgaccagctccgcgttgactttatcgactcttgttctgcgcatatgaagaaagccgattagttcggattcgaggacagggatatggcgaggtcaattgatcatcgctcttatatcccagtaagcgggcactagggcttactgacttccatattctgttcgaaggccattgattagtagaaggtccactggataaggcattgggagtccacctactcttctcctatccttgagttttttgtagacgacatcttcaggattatgctctgatagcccggcttgttggtaaaacagaaaaagaatgcggttcagatagccacaggtaaatgtgacagtgttgatcagggtgattgtggggagtccgtgattgttggagttgctgattgtacacggtcggggtacggcggacgaaactggccatgctaaactttgacttgattggtttctttcatccaccgccctctactccgccttataattgatagggatcttacctatgagtggggtaaattaccatgtcattttctgcccgacagaaataacccaagatgatcaagtctcaatggtcgctctcgtccgccggacacatccagctcaccgccgagcctaggtgggattatcgttattcccgcagcttctctgaacttttgctctccactgctttcgaggtcgcgattggtcaccaattaattctcctacctttccaaactcaccgaggtgcttgctgtgacaatgtctggtgaaaagcgccctgctccagagggcttcgggacctcgcaccagctcgtggtcaagcgaaacaaggccgccgaaaacgcaggaaccgagcttgtgaagggctcttcccaaaatggagctctcattcaatctgtatgcgccaagtctgccttcgaagctcaacgggctttcacggagaatagccagctaattttaatatacaggttcctcgcacaagtggtttggatgctcctatcatggaactcacaggtaagactctgtcgccaatttgtcgctataacacgcgctaataaaaggaacctactaggtcactctggtgaagtctttgcagtccgattcgatcctaccgcgcaacatatcgcatctggatccatggatcgttctatctgtatgtcctcgtcttgatccgggaatgcggccgccgaatacgttactgatggagattccttgaatagtactgtggaatacatatggacaatgcgaaaactacggccaattgacaggtcaccgaggagctgtgctggatcttcagtggtcgcgcgattcgcgggcactattctcagcatccgcagacatgacccttggaagctgggatgtggagaccggagaacgagtacgccgtcacgtggggcatgaggagatcatcaactgcctcgatatcagcaaaagaggacaggaacttttggtcagtggtagtgatgatgggtccatcggcatctgggatcctcggcagaaggatgctctggactacctccagaccgaactccccattaccgctgtagcattgtccgaagcgggtaatgagatctacagtggaggtattgacaatacaattcacgcctgggatattcggaagaaggccatagtctactcgatggccggacatacagataccatcacatcactacaaatctcgccagactcacagactttgctgtcaaactctcatgactccactgttcgcacatgggacattcgtcccttcgcccctaccaaccggcaagtgaagacctacgatggtgctcctgtcgggctagagaagaacctcatccgtgccagctgggatcccaagggtgagaagattgctgcaggcagtggtgatcgaagtgtggtcgtctgggagaccaaaactggtaaattgctgtataagcttcccggtcacaagggcactgtcaatgacgtgcgcttctctcccaatgatgagccaatcagtgagtatataccctgtttgcaagcaaatccacaatttctaacaaggtcacagtcgtttcttgctcctccgaccggaacctgatgcttggagagcttggcaaataaacatatatgataggtattaatgttttaatgaagatcagcgggcgtcgaattcattttttcaaacatgccatgtgcatccgttcccgatctagacgcggagaacggtcttattatcagagcttccagaggtcatgacttgtccggctattcatctggatctatgaattgtacaacaagaaccaaagtccaaaaatgctgctcttgaatatctctggttatctacaagaacattcttatgtggcctttgtattaggctgaccttggaatattttcattcattgtagacccgtggacgactacatgtatgcctttttccaatctctttgggcaaacgacgtaggtaaacctatcacgatctcctcccaatgcaccagattctcgacgagtctgcagaaactccttccccttggcacctcatcccaaaggctacagggaaaatggttcgcacgctgtggtacctgccatctagttttgtttcctctgtctccagtaaggcaagtgatgagtgtggtattgtcattttggcgactggtttaatccgtgtgtcttagttatacgagctttatttctaacatctgcaacgtagtccagcctacgctgtcatcctaggaccagcggaccgtggcttggatatttctctatcattgaagcattctgacgacttccatatctctgggcacagagagaactccatttcagcgcatcttctgctttacgtatatctatatggcatgagcaactcggttggtgagaaaatgatggtctcaagctggcctctcatgttgacgtcgcttaatcccaaatatacctgttgcatgtcttcttagggtctacctctgaaactacaatatcactgcatattctatagctaagtatagctggtatccatatctatatggtttatagtaggatagcacttgaagttcactccgtagagtaagactcaaaatgtaaatagacaaaaaggtatctaaattcaagatcgatcagtagactaattttataaacattccaaccttctacaagttgtatagacagtaactatagcatgcaagaagatgatgcaataagcgggaaaaaaacattccccagaggcttatctggccgaatcccccaacttcccactccactcgaacaagccgagggtgatcaccctattaaaccagtctcttttcagagaggcctgaaatagaaggccatctggcgccctatccatgatccctacggcgctcaggtctgctcgaagcgcacgcgacggaggcgatgttcaacctccgctccgcctacatggtggtctgggccatcctgttatggctcaccgtcgctcatggcatgcgagacagcctagtcaaagaactaaggtataatatatgctacccctggtcatctccgaaagccatctaaatccactaatacgcccctgtccttccgcagacaagaaactgagcgtatgttcttccatggcttcgagaactacctccaatacgcgtttcccgaagacgaattacgcgccctgacatgcggccctcttgttcgcgacgagaagaatccggagaataatgacgtgcttgggaattattctctgaccttgattgacagcttatcgacgctggccatcctatcctcgagcccggacagtggggagcaagccttggcacatttccaggatggtgtcgagagctttgttagactttatggtgatggctcggatggccctgctggtcagggtgaaaggtcgaggggatttgatctggatagcaaggtacaattgtttgaaactgtgattcggggactgggtatgttttcttttccctcccagcttattgatttgttgcatatgctcgatttccggcttttgtgtcctactgctaacttattccaggcggattgctcagtgcccatcttttcgccgtcggcgagctacccatcaccggatacgagccatcagaacgggaagtggcattcgctagcgcatgggataaaagcatgtttatgaaaagtgaccacggaattcaatggagcaatggctttgtctatgatggccaactgcttcggcttgctgtggatctggcccagcgattactccccgcattctatacggagactggtcttccctaccctcgggtcaacctgcgccacgggattccattctacgagaatgcgcctttaaatctcaaggtccgagattccgagggcaaacgcaaatcaaaaacggcggcatctgagccggctgagacttgtagcgccggtgcaggcagtctagtccttgaactgaccgttttgagccgactcaccggtgatgggcgatatgaggacttaggcaagagggcattttgggcagtctggaaccgccggagtgacatcggactgcttggatttggcattgatgtcgagtcggggaaatgggtgggaccatgggccggagtaagcacgattcttttgacaggtacaagcttagactaattggaagtagatcggcgccggcattgacagcttctacgagtatgccgtcaagacgtatgttctcctgtccgagggcgagcgtgtgcctttcgactccgacagcccttgggcagcattagactcgtactatgctcctctgacagactatcagcataccgccgatgccttccgacaagtttgggaagaatcgcataccgcgatcaatcgccacctattccgaggcgaaggttatcaacatccccatcttattgtaggggatgtgatcactggtgccacgcgggctttctggatcgatagcttgagcgctttctatccaggggttcttgccttggatggaaagctagatgaagctatccagattcatcttctgactaccgcaatctggacacgctactcgggcattcctgaacgatggaacgtggctactggtgacatcgataacggtatgccgtggtatggaggtcggcccgagttcatcgagtccaactactacatttatcgtgcaacccaagatccgtggtatctgcatgttggagagatggttctcagtgacctcaagcggcgttgctggaccaagtgtggttgggctggcattcggaatgttctgactggtgagctcattgaccggatggagagtttcttcattggggagacagccaaatacctatatctgctgtttgaccgggaccatccattgaacaagatcgatgccccttgggtttttaacaccgaaggccaccctcttatcatcccaagaaaaccggcatccgcggctcgccagcagcgaaccccatctcaaggccaggacatggccggcggagtatgtcaaattataccctctccattcttcggcgtgtcctccactgcatcccgaacagacatctttcatgctgccaacttggcacgcctggatctaatgcctgatcgaggagtggccgcaggtcctattttggaagactcgcctggacatcaaagtgtctttgtgtctgatctttcctcgccaaccaattacacattctacccgtggaccctgccacctcagctggtcccattcaacggcaccagcgcgcctatggccgttcggcccacgctcgacatttcattcccgtcacttccaggcggcgtaaacatgggacctggagcgttggaacgtgtccgagatggggtacttgtaaaaacaattggaggcctccgactaagtctggttcaggacgtacggttggaacccccgacggccacgactggggatgaggaagatgggtaccgggtgcaggtgatcaacaatgtgccattaggcaaagatgagaaggtatatctctctcgccaaatcacctttgatgtcgtcgatccctatgatccgaacttcacccgtgttcgcgacaatgccatgcttgacctcgtcattgacgttctcccagagccctctcgccgacgtaatgattcggctcatccacgagatgaaaattctcaaccagaaaatccacacccgccagaaccccgtctcggaggccacagcctcgcctcttctgtcaacgatgccgcaattgttgactccccagactcaacagtaagagccatgctgtcgtctctgatgcactcggtgtcatctttgcttcataccgaaaggaccgaacctgctccactcaggttgagtctccccgctgctatctctacaggcatcgggtccagcccgcttcccgatattgaagatgcagttaccatgtccttgctcggcggcccatctacagaccgcctgtcgtggtcaagtatatacttcgcgggcgagctctgcgacgagcgaattctccgtgatgtcgcccataaccacgaagtgctcgttatcaaacgtggcggctgcaccttctcagaaaagctccgcaatatccccgcataccgaccaacgcgatccgcgttgaagctaattgtcgtcgtctcatacgacgacattccaccacgcagcttccgcgagcagaagaaagagccaacgaatcaatccgggtctcgctctgccctcgccgctgtccgtgccgaatcgactctcgtccgtccacacctcgacgaagcgcaaatgacagccagtggcattccacgaaattacctcatcagcatggtcatggtcggcggcggagatgaaacatacgagctcctgcgccatgcaagcggcatcggagtcaagaggcgatatagcatgcgctctcgcggcgtcccgatcacgaacttacacattgtttgaatattcatcagatatactataccctattggaagactgtcggatcatttgtggcgtgtttgttttatgtttcgcagatatgcataattttagacttgaatatagtcaaacccagtttcacagagaattgaactggatgcatttggtgataatctacattcaaagtctcgacttactctccatctcaacctgaagcttcctccaagagtcaaccgccctcttagccgccgtctcaggactaatctgcccatccgtcatggtccgatggaaagtctccatagaaatccacccctcaaacccaacatcaacaatccacgccctagcaatatccacaacgggcaaataccccccaaactcaacctccaaagggaaaggcctggcatgcttcgaccaggtaaactccttcgcctcaccgggcagcgcccacggatgcgccaacgaataaggcggatcaaaccgctcggcatcagaaagctgcacatagaaaatcttctcccgcggacaatcgcgcacaaacctgcgcagcgaatcccgcagcttagtatccgcatccatctgcagtccgttcggagaggaattatcgccccacacacgagtcccttcgtggaaggtatccagacacagtccgaagttcggacggtcgacccgctgcacggtcgacagggcgtcttcccaggtggagcagtttgttccccatgacagcggctcgtaggcgattgatattactggcttgctggcgctggctaggtcggctagctgctggaggtcggatatgattgttttctcatcgcggctgcagtccgatgtgaagactgatggcacttgcaggtaggttgcgtgtagcagacgggcaatttcgagccagtgtgaggcgagagcgagcctttcttttagcggggttgttgcgccttcgtagttttcgaagggggctagggagaggacttcgacgtttgtttcctggcacagggcgtagatcttttgagctgcgtcgtggatggaaatgttttgggctttgctgtaggcgaggaggtcgttgtacactatttcaagtcctgcgatgccggcttgggatgcggcgcggattttgtggtcgaggaggtggcctgggtattggctcagggagatactggcgattgctagtttattggacaccattttgaagtttttttcaggaattgatattaaaacgttgacttgcttctatgaccgaactgatatatcgaattagggcggaactcggtttccggtatgtggaggattcgcaaatcgccaaccccgcaattggccattgagttattctagtcaggcattgggtggatgtatttatcggtcattaatgaccgaaagtgtgaaatagttgatcatcgccttgcaagagttgtcggttggaactagaaatccgggtacttaagccgatactgggataactacgatatgttggaatatatcttcaagctcgcaagcagcaaatatacaatacaaatttgatatagccattgattcatatctagcaaatacgtcaataacaaattcaactgcgatcatctcccataacccaaacccctcacaatatgaggctctgtctctatcaaagtttcacccccacgcagagtagtccaatcccgcctctatgaagaattgtctaagccacttattaatcctttcgtgtggacagataccactcttcacgccagacaatccctttgagaaatcgaaagtgtaggtatttctcacatgcaaagacctggactcggaacttgaaagccctctggtggattccttatatagtctcgtttcgattgcgacttttgcataaggatgactggtgacttcacaccggtgccagacactgaacgcgtaagaaggataaaggaaccctaggcggcatagtctttcgtgatcgttgcaagagatcgtagccgacaagggttcccggtctttgaatgcgattctgagacagggacatatatcggctaaccccgcatagggcacgcagatcacgccaccattgagtaagccacacctgcagcaattagttactctctttggggtgtttggggggtttgaatgcggagcttcggtgtagattcatacacatcacgcagcatttccagcgtttgtcttcgagttgtcgtagaagctggattcgagggttttttcggagctcgatgttgcggtatatcaatcgacgcccttctctcaggaccagaagtttcgcatggtctgggtctttggcctgaaggaataagacaaagaaggtatagagatctttataagtcagtgcaaggtagatttgctctagcgcggagagatggggagaaatacagacatatgaaggagggagatagagctatcaccatttgatatggaacgtggagcttgcgtttatgagataggtaacactaaatattgtacatagggcttaggcagtgaattctcgaagcaagactaatatatttcatagggaaactagcatatcaaggttatacataggaaagtcgttttcccttctgccatctacatagaaaaggatatctagaaaaaagactaaaaaggctaccataaggccaactagatctctcgtttgtaccctatcgagtaaaaagcaacctacggcaagcctataacatcgggatttggcctttaacatagttaccaagtgagtaaaaggaaagacgtgatggagatgggttccacttcatgtctccaaattcttgtagaactgaacggtaatatcaaccccccgcaatcggggctaagtatgtggtcatttactgtgaactctcttctctcctcccttcaacatataattgcacataacaataaccagcagctcatcaccatcaccaccagaaacaatgctccccaacccaaccacccttcaaccagcagaaagacacacccaagccccaatacctaccccaccaactacaaaaccaccccaatacccaaaatacctctacttcgcctacggctccaacctctccccagcccaaatgaaaacccgctgccgcataaatcctacccactccgctaccccactagcaatcgcagccctcccacactggcgctggctaatctgcgaagcgggctacgcaaacatcctgccaccacccggtctgcgcgttgcaaaccaagactccgagaccgcacataagattcccgtttccgggtccgaggataccgtctacggcgttctttaccagatggatgttggtgatgagcggattctggatggctatgagggggttgatacacgtgctgctgatgcgaaggctggggatggtgtgtccgtttctattaggcccagggtgcagggcgatgggtcttataataagtggtttgttggagcggatgttgtgaaatggctggatggggcggaggggatcaaggcggggcttggggatggaaaggggaaggggaaggtgccggttttggtctatgttgatgagaactgtgttaggctttctgagcccaagtttgagtatatcgcgagaatgaatcgggctattcgggagtctgtggatttgggggttcctgtgggatgggtggaggaggttatgaggaagttcattcctgtggagtgaaatggtatagatttagatttagatttgagattgatcgatagattgataagatggatgtatttgatcatatcaatcattggccaggtccaattcctatagagctactctattaaaataagatgtaattagccagtgactgcaatctatacacaatcaagtcgcattgataaagctatttgtctatatttgggtattatccggccgggagctgcgccagccgtggcgggtgccgtcgaccagcgaaacgaacctccagactccaagttcgagtaaattgtttgattgggcggcccgggaggagcggatggtaaaacgctcaccgcaagatcgggtgtggtcgggcttttgaaaagattgggtcattataatcggcagtcgagatcgtcgcagaaagaatgattttttggggagcggtgtgtagaattaagcctggccagagaggagagtgtgaaccggcgcggggagcttgtcgcgtccgtgaaggaactccagctcgaggaggaagatgaaaccgaggacctcgccgcccatcttctggatcagctcaccggcggccttagcagagccacctaagaatagctattagtatgaagtatccaccgatggattcttgtcacataccagtagcgataatgtcatcaatgacgaggaccttctggccgggcttgatagaatcggcctgcatctggaagaaatcctggccatactccttttcgtatccctgagtctcacaaggaccggggagcttgccctgcttgcgcacggggacgaagctggcacccaggcgcagtgccaggctaggacccatcaggaagccacgggcctcgagaccgacaatgacatcgggcttctggttaccgtagttggcggcgacgtgaagttccagggagcgaatcagggcctcatgcagggaggggtcggcgaagatgggcaggatatcctcgaacaagattcccggagaggggaaatccgggaactggcgcagggcggcgcgcagtcttaccgtaagactggcgagttcggcggcgctggtggcatcggaggcggggagtccgactttggaggcatctgggagcgtggaggacattatgagagagaagagaagaaagaagaggggaaagaggagagggttggaggtaaaagggttaaaaaagaaaaagcccaaaaaacctttggaggggaaaaaaagaggaaatggtaaaattacagttgataagccgataatgggggggtttcgtgcccctcacagggcctagatcgttacttgttttttattttgatcttttttatatagaaactagatgttatatatatgtctatttggtttataacactagaatataccttatatgatctctatagtaaatgttggcatatccttctatcaaactacgggttctatacttccaggtacacaaaaatcagcggtcagatcccgccactaaggtaacttactgtcacgcaatggcatattattcttcttctagaaggtaagactactgtactactagtatacttactttactcgtacaaggggttggatatgggcccggcttggatctgcgagaccctaattgattatcccgtaaacctagtgctcagtcctctcgtcgccagggcacgaattgtgttggactaataccactcgatcgtcatccctgacaccgtgttccggttccccagtagcctagaccgttggactgcgacctagactttatggttactttgaaggtcccgaggtccaggggaggacagaaggcagggctgaactagggctaagaccgccagactaccaagggatcatcataaatgactcatggctccttgaccagactggagctttagaatcgcattggatcagaccatctcaccggatatgcgccgtatggccagccttgacacatcgtacggccatttcacctagccctagccaataggatctctcgcgccacgacgtgatctgaaactcatcacaatggctttactggaaagagacatgcgtgctgcatagcgggatgtctgttgtgcagatggtggggggatttgtccgttgtctgctccgcccctcgctttgactaggggaaaggaacaaaagtacgaggtaaaataaaacagaggaagtgcaggttactgtatactataggtcaaaaaggaaaaagggcaaaaaagaaatctcaggtttggttttaggaatagccgaacgcgggggtcgaacccgcagccttaagattaagagtcttacgctctaccgattgagctagcccggccgggctgttgaagagagcagcgaaacagtgctccatggacggaaacaaggtctttggtagaatatagacatgcaggtggcggtcttagcgcatcctgcagcccgttgagaagcataactgtatatgacactgtcatatagggttgtataactacttgaatgctattttaatttgattatactgtacctggtgttggtacatttgatggcaacgcaaacctcttcaataatctcttgtcagaaaatcatccgacatatataattaccctccccacactatcattccctctttccttccctaaggtgacggcgaaataatgctacataagactaaacagtaggagttcgaaattaatatagtcaaattgtgtttatttagctggaattattgggaaatataattgcaaaagatatatcaatctccaattgagcgtcgatctttcgaatctacaccaagtacagaataatatcccttagatacctcctaggtgagcagttgactgtccacagttatactttacttgacactataaattccatcatccaaagtcactcatagcctttatgttgtcacctatatgtacctgcatgtacctgcgtataccctatgcagtaatgctacatatacgtcccatgttgtacatcaaagtatactcggcggcccaagcctaaaacgggatagcccctcacatgaccagcacggaccacctcgcttcaagtttttccgttgtctccccatcgctataaatccgtcggtttccttcctttccatctcatgcttttaaagattgggagcctcaacaggccacttcgatttcagatgaattttttctgataccttgtaataaattcactcatgtcacccgccgtgattaccgagatgcagccggatctgcatcatgaccagctcgaggccgtgggcaaagccttcgatgcactcctactaaccgtgtatcggctgactcacagacaaaatgagctgttacagcacatggataatgtcttcaaagaggtaaattcacttctctcctcccttatgcttctgcatcctggtctcgcatgacgaagaaaagctctagatcaggagtcacttttgtggcgatgacggattaacatgtattatctgattgagaccatgactgccttgctgttatgcatttgacaagatgaacattgctaactttgtatcttgcagtacacagatgtgatagaaattctgcctcctcaagatagacatcgtgcatttgacgttcaaaacaagttgctcgctcagcaagaagaataccatcagggtctcgtacacagcaagcctcaagttatggaacaaccgttgaattccatggatgtaatcaagaccctcgttgcacatcaaaatgtagacgaaaatactttctccgctatcaagaatggagtcaaagggtgcaaatctctactccgttcccaagatagcctctcccaaatatcctccaactcgtgcatcctcgcgcaagcaccggctccagcaatcgcgctggagaaggacttcacaacgaatggcacccagggaaatctccactgccctttctcgaaaccgaataagatgcagagcacaaatggcagtgaggcccccagcgggaaaaactctgcgccgaagatccagatcgaagcttgcggccacgagcatctggaccccatcagggcggaactcgaagaacgacgctctagccacacaccatcagccccgtcatcaaagggaggatgccccgtctcccgatgccccatccgattcctcgatcagcactccccggaagaaatcgccgaatatgttgaacgacacaaacatgagatccctcgcagccacgctatttgtgtcaagcgctatcagcgaagcccgcaggatatgagacaactggacgccaaatacggcggcctgaccagcatgatcgctggcctaggtgtgaagcaccaagccttcctgccggaatgtaataccaatggtgaagcccgttcctcgcattctgcgtcgagtgaacgtgttgagaaatgggccgagaacgtggacctcagtacgcccattgtgcagaacgaggaaaacgaagagaagaacgaggagaataagaacgaggatgataaccgccagagtcactttgaccgccccctgcgtgaagtccgcgtgggtgaatccccgagcaggccttggggtatttcagtgcctgtcacacatttacctcctatctcagcgccggtctctggttcatctatcccaacgtcccccgaccctcaagccgacataccttataaacccaccgatgccgaagtccttgctaagcctgccggtggctgtccattcggccacggtaaaccaaagcctgaagcagcaaagcccgaaatcgaaccacctcggactggggaaagtcctaaggacaatgatattacttcaccaaagaaatctggttgtccattcggccacaataaaccaaaagccgaagttctaaagcctgataccgaggccccctggaacggtgactggcccaagacctggcccaaggaccaggctgtcgcagatcgagtacctgcaccccaggcccatgtttccccaactgctcctgctcctgcgagcgaggactcgactacgaaacctggcattccctcaacattctcacccccctcccacgtcaccttcaatggccctgtcttcttcgggtactccgccgaagagactgccaaactattgcagcagttcggcaacctgggcaaatcatgaccgcgaagaaacttctttgtatagtatgaccatggaaggcgcaagcttttaacgcatcacgacgaaacgacttaatttttttagcaagcattgtcgttgtattacccaattgaacttgatttgatataaatttcaatccattttccgtaacagctttaataacaaaattcacaatgtaaaataaatgaatgacttcatcggagagcgtcgacgctccccgagggaaactcgcagagcggggcaccttcgtatcatcgcgaccttcataacttcctctctccccgatgctgcgaactacttctcgtcttctatctctatctcgaatcctccgtccttcaattccagtcagacctcaattctcttctcccataatgtctgccaacatgtccatcatctcctctaaggatgcctgccctcgtgagtcaagccccgccaactatggctcctcacctgcctcctagacagagaaaacagactcaattccagaaaaaaagaatcaaagaaaacaaagagcaatagctaactcacacatccttagctgccggcccttacgtacgtcgtccttccctctatctgcctccgcagctcaatctaccttgagagctagctacccctccacaccggaccaatctactccaaaacaccatttccacacctacacatattgtaaagactataagtgaaccatctaacaaacccaactacagtcccaggccatccgcgccaatggtcagatcttcgtctccggccagatccccgccgactcctccgccaacttggtcgagggcaacatcggtgcccagacacaggtttgctgcgataacatcaaggctatcctgaccgccgctggctctagcgtggacaagatcgtcaaggtcaatgtatgtgtttccctccaggctttgttactgtggtgtttctggactcggctttgctagggagaagtatacacaagatatgagaaggaggacgctttgctgatctttattcttttctcaggtcttcctgactgacatggccaacttcgctgagatgaatgctacttatgagaagttcttcgtccacaagcctgctcgtagctgtgttgctgttcaccagctgcccaagggtgtgcctgttgagattgagtgcattgctctggagtagatttgagaatctatttagttttggtcttacttctactcgagccatgaaaacaaatataaagacagtttagtataagaataaaaatgagaatgaattcgatcgaattatgttgcgaaaatcctcggggatatcttcatcttgattatttccatttccgatcccgtttctctcgaggaacatacatgcgcgagtacaagcagatgccaaattgggaatcataagagtcaagggttcatgcgtcatgacacagaatgcaagagacgaaggaaatggagaatagggaagcaaaaacacacaacattactggcttgatggatgaaaaaaaaaataagaaacataaacgtcaaaaggtaggaggggagagcttgatagacaagtgcacattcaccggccacgggacatgataccgctcatgcggcttccggcaccggccatcaggctctgtttcacgatagcatcggcggcggcggcggcagcaagtctttccttctgacggctacggtcgcggagatagccggcagcttcggggcgcatgcgaagaatgcgcaggatcatgtcgtcgttcggatcagcctgcgcctcccgtcgcttctcttccttggccttcttcatcgtgcctaggttgcgggaaagcatgatgctcttggcgcgacgggcagcaggaagaccaaagctgccgtagccggcacctgtggcgccgagatgaggaggtgcagaagtgcggttgcgggccgcttgttggcggttgacggtcgccgaggccatgcgttcggaggtgcggataaggtgctccgttggttcgaagtagaagaaattcactgactgaatttcgtggtatttgggcgatttcaggatatcgattgggacgccgtttgcttcgccggtttcgtcgtcaaccgcatggaagaagttcaatagtagcacgagccagcgtgatacgatgtcgacttcttggattgttaatggcttctgatgggagggtttatccgacaggggcggtacaagtagactctcgatagtagcgagcacttccttccataggcgagccatcaccatcttcatggcttctggtgtgagggttttgttcatgatggcgaagttgtcgttgaaataattgaacagaggagtcagtgcattttcgacatctgccggagtgggtccggcaggagctggctgtgctcgattgcgatttaagaagctcgagacactagatatactgattccgcgagagagcaaagacttcagtgttctccgggaaagacagtgactgatgtatgacgaaagcttctctgtgatctttcgagtcatatccctttccgttcgtttgagtgtacggaaagccttcccgaagtagaactggatgtcgtctcgctcgccttccatgctaactcggagcagaagccgaccctgggtatccaggtcgagccaatactcccttggcaagaagtcactaaagtgcacaggatctagcttgatcgacgtgcggccaacgtagtcgtgatcgcccactgcgtcccagtcccagatggtggcgataatgttcagagggccctgtgtggtgagatctactgcatcctcccatcggggattaagattgttgtagatgattcgggttttagcaattcgtttctgatactcgtccgtcaatacgacatatggatcgctgccaccaccaaggtcgcatgctttcaagtcctctgcctccactaccttgattgtaaagacataggtagtagacttgcggaccttcttaagctgcggtggagtattccttgcaatgacttcggcgcacgcgtcgacgttgatgtccttttcgagtttgtcgagctgagcaagtgcatactcaatattgttcagtttcacaagggactatggataatcttagccgcgatattttacccagttgaaatgaataagaacatacctcagaggagaattggaagggctcaattttatccttattcgtccaggtgtcttttgcgaactgcatcagtttttcctgggtggtttgattcaatgctgcctcctgctcgggagtaagacgatccatttcctgcgtgaacatcttctccaaggagtcacagtatgtcgccacacctttcccaattgaattagagagatgcgtcatgaacttcgcatattgaagatcatcgtcccactctagttgcaccatactttcaataacttggttgaaagatcggaaaatgtcaatgactgacacactgtgacgatcgtcttcaggcgcaagctctgttgttccacctgaacgaatggcaaatacatcttgttttgtagcttcgctgacccaatccatgatcttttgatcagtcagacgaagccatctccagacgaagtcctgaaggagactttccacatggaatgggaatggagcactgagctaagttagtaatttcacagaaatagcaggggagtccaggggcttactcctcatgggtgttatggaataaccgtctgatagtagcgaactgtttgtatagatcgaagccgtcgtcaattgcgatctcctcacccctcgcttttgcctgctcgataatcctaataaccatttcatgtgcatcctcggcgaacatagggaggacgttttggcacaaggtggtaaaggggttcacactaattgtaagttaggaactgatcagccaaacagacgggaaagagcgggaaagaggaacccaccccataatctccggatttttgcggtagcgtttttgaatctttagcgcaagttttgagattgcatctccaagttgaatgacatggtcaggatcccaggcctcttgttccacagggattatttcgctaagaaggctttgatactttgttgttgccttttcagcaagtccctcttgcacgtaagtgctgaaacgattgatgtcttcagggtcctcaatgtagttgggatccatctggatgtgggtgtcaagaatgtacataaccgggccgagtgggcgtggctttgcctcaaagcagtccatcatagcctcatatagctctcggagcaaagcctcatgaagtttagacagcagcatttgcatcgtttgaagatcctggatagtccatcgttgtcgatcaaaaaccgtggaagccacaaagctactgcgtctgcggttctcgcccgaaggcatttctttcacaaaagtaaatgccgagtcaagggtagtgagatcgatttcattatcgacaaatttagcctgaaccacctcaaggaacaacacgacccgggaaaaggctggaatccgccagcggagacatatctcattaagcagttccgtagactgcttcgatagcagtttcattgaagggacgtcagatgtagcctgcgtagcctcaagctcccggtcccgcagatcatgggtcaaagtctgagacaagatgtatttgtacaaagacctagggtcagacgggatgaatgtgtatgtatcggattcgtccgactcttcaagagaaagcccagtcaaatcaataggttgatcaatgacataagatgttctgtcagtccgaccagacgttgttcttgacaggtcgaggttttcgtggggactcgaattgaactgaggaatggatccgggagtgcttttggctaactcggggttggattgcatgattgcaagcatcatctgtgagagatcagggccttcgctctttttccagctatcataaccctcgtccgactcaaaatcatcccttgacaatgttttgtgtgtctgaaggtttaggtgggcttgataggtcttaaggtcctgcagggcggccttttcagtccaggcggacttgtacttatcgatttcggattgtgcctgggatgtggtcatcccaaagattttggccacatgttgcaccaggggcatatccttcacatcataactcaatgcgccaacactctccgtggtagatgtaggtccgttcgtttgcatgaggtcctgatcttgcaggagaagcttgttttctagcaccgtcaatcggttggccaattctgggcggtccttggaccactcgtgatctttcagggtgagcgcaaggagtcgaacaaaaagcgcaacgtgccgatcaaccatgagcttccagctgtcatcgtcttgctctttgcccttgcccagctctttgactgcgttggagtagaaaatcaggagcagatcttcagctcgtcggtccttctccatgcgttttcgaaaggaggcctccttcaggacgttgagaaagacagcgaatgtccgcaccaccaggtgatcttgatattccttccttttctccttccccatcaacactccagtcaaccgcttctccagctcggccacgaagccatggggaaccctggtgcttttcgagtctctgaccaaggagaaatcgctcattaaatcatgaatagaggtggctgatcgttttggccgcgccggcgcgacgggggcattctggatgcgacgagagcgagggtggaggagataggcaaggtaggcgacccgaatggcatggctgtatgccacgttggcatttacggggcggcgcctggatacagaggagttgcgcgaatggcgaccctcattttgaaggctgttaatccgtcggttgactcctcgggattgggtagatgctgtcgacatggagttgtcaattaaatccgtgaaacgttaggaggtgacagatagcgggggaccatggagaaagttgggaagcacttagcacccagaagaagcttttaaaagattcttttctttcagtccaaagtgaaaggccgccacaaagctgaggggtgaattgtttattgaagggggcgagtgagggggggaggtgaaacaaaaagctgccgaacgactgacgtacataggcatataggcagtcccgtcccaaaacaatgctatgtctcctctgactattctatgaggttattatggtaattttcttatttttcttttatatgcaagtgcttattgcatattgctagttcaaggaaacttgatccttgttctccctggatggggccacacttataacgctgcaagggtttccttgttatttgggaatatcaatattgacatcaagtcaaaagttacatctgaacagatatcaaggacaaggatatgcaaaagacatttaatttaaaaagacaaccccaaaggacatcatagtgttatctgaatataaagtccacaatgtcaaatgaatttcaatgcgatatatcgacccatacgacaaacacaaaagtgggttttaaaccaaattcattccgagcatgcgagcatgcggccggccttttcggggtttgatgaaacataggactggtgaatcgaccaccagtcctcaaagacgccgaagatagaaaatcgtactggtatttacacaaataaaaagagaaaccaggtctcaatcaccacttatcgccggacttgtgggcctaaatcaactggttagctctttgcccatgtaaaaggttcttgggatatcatgtccggtacatacaggcacagcattgggacctcccaactccttttccagaccatcgacgtaggccttaggaacactcggcttgtcagggtaggtaaggctgacaacaccaaccatgctaaagaaaacagcgacgaagcatccgaggtggaagaaacccttgccggccgagacgtggttgtattgctcgggactgaagacaccgaggatttcgttatcctcgtgcacgggttcgccgaagttgcgcttctcttgcgcatcccaccagccaccgtaggggtctctgtgtgcccgcttcaaagggggagggttggggtagttgttattctgttttgggggttaggttcccggatgccaagtagggaaacggcatctctgccatatggatgctatacctgtagagccatgtcatcctcaatagcacggagagctgggacctgggagaaagatgcgcggggagcaatagctcgcacggcaacttggggcaggcgccgggccaagatccgttgagacaacatctaagagaggaattggaggttagaaaggctggtacgtaattgaagaagataatatggatctaaagaaagagactcacagttatgctgaaagacaagcagcaaatcagttgtcagaaggcaagagagccaattgggtagagggggttgaatatcgatgatgaacggatggaggtttgcggaatgttgtggcctgaggcagacagtcacaagacttcaggcatccacgcgccggcgcgaccatgtaattgctcgcccgaaggaaaaaaaccactctccacgtattctcatcatctccgttgtttttccgtccccatccacgccacagcgccgataagcatgttaaacttcgtgtagtatctctactcgatagtccctatttgctgatgccaaaatcttttacgtcgactgcgtcattgttgggatagctggggtcacctgccgccaacggcccctgtcgtctgcgggtacaagtcatgcaaaacggcacctccaacggcccatcaccccaagatgaacgcgtaacgcctgtgtccgattccacacccctcaatgggtctgtaaatgaaaacctgtcagattccgccccccgcgaatcgattccttccgacccgaaagacgtcgaagctgttcatcaacccgaagaacccccatcgaagaaacgaagactcacggattcctcctcatcgcaacgttccactcccagaccaccatcgcctccttggaaaaaggctggctttgagggccccacatctttcctctctgaaggcaaacgtaggtcttcgcgaacgaacgctgtcccggtcgaattccaacctgggtcggagaagagacacacgcgggggattcagaacaagaatgttggcaggtccgctcgcgatggaagcaagccggctgcatcctcgccgctatcggtaacacagtcacgagccgacgtcaatggaaaatcgggtggaaaggccactgcaaatggatcgcctaggacggcgtcgcgcgcgacggccaacaagccgtcgcgtatctcacaaactccagcgccaaaaccaagtcattcacacaccaaatctcgcatctccgttaccattcctcgcccgtctggcgccaacgcgaacggcaccagctctcgctcgcttcgcgatcgcccatctctttcgaatgtatccaaggaggtcaatgtggattcaggtgaagtcaatatgaatgacaaggaaccggaacaaggaccagtgaaaattccaaaattgcgcattaaattgagcaagcccgttcttcctattcgacaccctggccacataccgcagaagaaacacacttctttcagagaatgggtataccaaaacgatacctcaaatatattgtcagaggacgaggctgcggtagaggcacgcaagagacatgaagttatgactgctgctgagcccggtggaccgttgagctcgcaagtctgctcggcatacatcacagaacagcaagaggaacctcccccacagtactcgcaccaggatcacttggtttcccacgcactatatttccagaagctcctcgacaaagaacacaaacgccaccggcaaacagccaaactgtttgcgcagtggtgtgctgacgcttatcggaaacgtcacaaggaccccgaagatattctacgcgagcaacaggaggagatgcgtggaaagcgcaagcagctatcaaaggatcttcagaagatgttcgacttgacccgtgccgatattgatcgggtccgcctagcacgctgggaagaagagcggaaaatggaagaccagcaggctcttgatcgcgctatcaaaaagtctactatgctcttcgagaagcgtcgatcggagattttgggtgaattgcctagcgatgctcttgtgacgagtgacgatgaggatggtgtatcaggcttctcatctggccccgacgaagaagacgagagtaacatgtcagattctgaatccggaaccgacgacgaggctaatgtggatgatgatgccaaattgactgcggaagagctccggctgaagtacgctaacttaccggctgacgactataccgaccggatgtctgtagcctcaggcagtacagcaatgaccaatcctaacgactccttggatcctgaatctcttttagacggcctcgattcacacctcaccccggaagataatcagttagacgatgttgattcagtgttgatggatgatagtgatgcctccacagatatggatgatgatatgggtgatagcgatgaagaggaagaagacataagtgaggaggagtcggatgaggatgatgagagccgatctggcttgctgggtttcttctcgaagaatgaaacccctataccaaaagagggcgatgaagcttcagctgtggaccacgaacaagatatcgatatcaaatcggcatcggagggtgaagatgacattgacttcgaagaagatgaagtatccttggttccaattggaccaactaccagcgagggcacgtcgatagaaggcacgcccttacatatcgccaatgcttccgaagcctctcctgctattggaggagaaacaccttccgttgatactccgatggcagaggggctcactgaagccgaagctgacgatgcagccactgctggtgtcgtacatgagttggagtctgtcaaaccagagaccaaagaggcaccttctgctgaaatcgcagatgacattgatcacccccaacatatggaagtagatcatgtccatgacggccgagcaagcagggatatgtccagtgagccatcgccgggaaccttcgcaacaaagccatcagagcccgaatcggtgtcatcgctcgagccgacaatcgaaaaggcattgcaaataagtcattcgcctgctctaggcttgcagacacccatccctcagatcctgcgtggtacactacgtgaatatcagcactacggattggattggcttgcgggtctctacaacaaccacatcaatggtatcctagcagacgagatgggtctaggcaaaacgatacaaactattgcccttcttgcccaccttgccacagaccatggtatctgggggccgcatttggtagtcgttcccaccagtgtcatgctcaactgggaaatggagttcaagaaatggtgcccggggttcaagatcatgacttactacggcaaccaagaagaacgcaaacagaaacgccgaggttggacggatgacaactcctggaacgtgctgattacgtcgtatcaactcgttctgcaggatcaaatgtctctcaagcgaaaggactggcactacatgattcttgacgaagcacacaacatcaagaacttccgctcacagcggtggcaagcgcttcttacgttcaaatcccgtgctagacttcttctaacgggtacgccactccagaacaatctcacggaactttggtctcttctgttcttcttgatgccttcagatggtaccaatggtggcgtggacgggtttgccgatttaaaggatttctctgaatggttccgccgcccggttgaacaaattctggagcatggcagggagactatggacgatgaggccaagggcgtgatcactaaacttcacaccgttctgcgcccgtaccttcttcgtcgactgaaggccgatgtcgagaagcaaatgcctggcaagtacgaacatgtggtctactgtaggctatcaaagcgtcagcgattcctttacgacggcttcatgtcgatggcccagaccaaagagacgctcgcgtctggaaacttcctctccatcatccactgtttgatgcaactccgtaaagtatgcaaccaccccgatctatttgaaacccgacccgtctccacctcctttgcgatgccacggtctgtgcctatggactttaagatcaaggaatccctcgttcgacgacgactgctttttgaacacccactcaccaagattgacttggatttcctcaatctcgcacccgtatcacgagaagatatctcacgacggctagccgacgacagtatcaggctgatggctattggcccgttcaagactctccgagaacgccagtacaaccgaaccaactgggagatgggttttgatgggtccaacatgcagaccatcttagagtccttggagaatgcctgtcggaagaggcgaatggctgaattagagaggtgtctctacttcgaatccaagcggcatggtcgtcggcccgtatacggcagtagcctcattgaattcctccgggctggaaccaaggaacacgcgctatctaatgcaccactgcggaagcgctcaatggccgactggctgtcaagccggtcctctgttctcgcgtcgatgattctcactgttgaagaacgcgctcgtgagatgcatggctatgtccagagatttgcctgcgtcacccccgctgctgtggccgcgggcatgaatgaggctgccttgactccagtcgagaccaggcttttgacgaataatcgcccaaaccccccatacgatcctttccatgaagcacggatgcgcctctctattgcgttccccgataaaagattgcttcaatatgactgcggcaaattgcagcgccttgacaagctcctacgtgacctcaaagcgggcggccatcgagccttgatttttactcagatgaccaagatgcttgatatcctggaacaattcctcaatatccatggccatcggtatctccgactcgacggaactacgaaagtcgagtcccgacagatgcttacggaacgatttaatagtgatcctcgcatcctcgctttcatcctgtcgagtcgatctggtggtctcggtatcaatctcacgggcgccgacacggtcatcttctacgatctagactggaacccagccatggacaagcaatgccaggatcgctgccaccgcatcggtcaaacacgcgatgtccacatctaccgcttcgtatccgagtatactattgaatccaacatcctccgtaaagccaaccagaagcgcatgcttgacgacgtcatcatccaagaaggcgagttcaccacagactacttcaccaagcaagacgcggtcgaacccgacgcgcgcgacggccaagatgaagcaagtgccgccatggaccgagtccttggcaaccgtgtcgtcgggggaacccgcgtgttcgaagcagccgaggacaaggaggatttagacgcagccaagaatgcccagaaagaacaggagcacgccgacgatggtgactttgaggagcacagcgcctcgcacgggacaccggctcaggctggaacgcctttagccgtggaagatggggctggcgtgccggttccggagcacgtgtctgatgaccagctggctgcagaattgcagcctggccacatcgacgactatctcttgcgcttcatggagtggaacatgaaggatgaacccctggttctgccggcggataaaagcaagaaaaagtccaagaagggcaaggagcaccatctcaagaggcgtcgttagagttattgcgagatcaatgctcatttgcctcctttttggctccactccgcatgtttcacgtttcaatatttccctcacgttaacctgtttgtctctccggctatcagcttgttgtaatagtctctgtgtgtataatccaggcgttggcgatgttataatgttttatcattgtctttttttctcctgatcagctggctttattcataacttttaactctccttttcttttgctctactatttttttttctcccattctctgtgttaatcctactatattaacaaaagactcaatagaatcagttggcagaaataatcgtcacaaattactttcaaatcaatagtctatttcccggagattagacaagtggagcagaaatccttcctgggtctgcataggcagatcattttgttctgaccatataaaccttggatatttcggaggcgattagggtttagctcggtgtttatattaatatcaatagtgtgagagccggggaattgtctattgtattatagattgtggtggagtagagaaacgggatgcaacaatagtgcatatggttctcctatgttgtacctcggagatgttagagtgtagatcgaagatgtagatgtgaatatagattgtagtacaatgataatatactccatatatgcatccacagatctatcaagttgaagagaacaaggtcatctatggaacagaaatagggtttcccctattctcccgtctgatatcttcctccaacgagggtgcatggcccggtcgatccccctcaaagccaagtcacacctatctcggcaggttttctccgaacaaggataatattgaacaagggcgaccgcgtggttgaaggcagccatggaaagcaggaagtggagcctcattcggcagttaagggatacatctcggatacgattactttttgcacatctcgacggaagtgaaacagtgacacaaggttgacaatgttgccgagtattccccggttgtggacgttgatttgacgtgatttcacgtgttggagtccttggacttgttggagtcgggctccactgatcttctctccaaaagtctcccgaactcggaatggaattggcaactgtagggctttcgagctccgtactctattaagctttggagagtgcctcgttggaggtgcagcagatccatggtgatccggggatctgtgatttagtacatcctaaacctgatatatccctgtcatccggattaggtgattggtactttgaaatgccgtggatcgagatatatggcatttcgtgattggacggggaagaggaatggaaaaaaataaaacaaagagaatcagatgaaaatatgccgggcttttacagggcccataacccagcgaggtatttcaagcagtattttctttgtacaacatagggaggaggcggctgtagacacgtcaaagaagtgatcgccatttttagcttgcggatgagcaaatgccgatgtatccctgtgttggatctggtcttattgcccagtttgggaaggtagtatggaatatatcataaaacaaagaaatgatttctcgtatccaggagacttctagtcggcatttctccatggattctcattcccgagggataagaagctcccatgggttaaggatcctgaaccaacagccgaagccggacatctgcagttcgagagagatggacgtgacatatgcaggtcgaagaaacgcaagtgatgattggcacagactcgtgggacttttcatgcagctcgggcccgtgcattttctgatcctcgtcacgtcaaaatgtctctcatattctctcaatctcacgactagatgtaatagtgccatgggagatcccgtctaaggggggagaaactcaggatggcaccaacatggagcccaatattccactatgtattgaggacccgggaagatcgtcgccgatcaatttgccagatcgataggcgcttccacgaactggtactccacgggcgtcaaatcattggtgtgaggcaagaggggctttacactagttctgacaccatgtgccttagcggattcacctccggccgtaaaaaaagaaagcgctgctgccttgggatctgggggaggagatacgttcgaatagtgttggatctgaatgatgtgatgatcccgccctcctcgaattgaatttgcagcacataggttctaattgacaagggattcgaagttctcaacggtgctgcctctggataagacatctggtgtagaaatgtaatcgtcagtctatccatggaggatcccgaggtggcggtgatcggcgaccatgaggtccaagacgccatccgcgggtgagaggagggcttatctgggttggagtatatgaccgtattaggataaaactggggccggctagggccccaatgcacagtaaatcactcctggggaactataggccgtgttgtctttgcataaccgttgcgttgggatttcccccctcgattatcgtcgggcatgatcgggccaagggaactaggatagcatatgtatctgtgtatcttctcgatagatcgaatgttggaataaagaaaaaaccacaccatagtcagctctgtacggagtacaccgtagagactgaggtgattcatcgaattccgatatccgctttgttcaaacgcgccaagcactcaactggggatagtcagacataacagatgagctgttccgcttggatgatatgatccactcgaagtaatgacatcgccctgatcgtcgagacccgtaaccaatgatgtttgcgctgcgaatctcgttgatgatcgccgcgtgctggacgccacggacgctaagacccaatggatttcccccaagagattgtgtgttttagggttccataatgacagaaccaagacaatggagatgtggaggtgagaggtggtgagagggaagcgggtgaagttgggagatgaccttatattttaatgttttattttatttccccctaagctattcccccatttctacatataatacttgtctcgcccgtttcctgtctcttttctgttgatcatctcgatcttcgtactattccccccttttccacttcccaattggactgtgcgtcaataatgaagacctctatctcgtccgaggtatgggagaagaagaaggcgttgatctccaagttgtatatggaagatgaatggcccttgaagcaggtcatcaaacagatccgcaccgacgacttcaatcccaggtgagtgcaccatgtccgataccggactctatcatgaactagttaactaacatctctagtgaaacccaactacgaagcagactgaagaaatggcgagtgaccaagccatcccgccagactcgaaagaagagtctggcttcggcagaagacttagactcagacaaggatgccaagcgcaaggcatccaccatccaaagaccactgccatcattatcaacgagagaaacacaagcccgccatgaatggcccatgatacaacccatctacgcacaacatcccaccctccaacaccccgtcccagaccgggaccggaaatggagctctcctatgatccaacaactcaccccaagcccctccggcgagcacatccaagaccgcacgacagccgtctcctatgccgagcatagtccaacaacaacacccttcgaccaaacccacacctccccagtcggggagggccttatgctgagcacaacccccgccgtggccccatcctacccagcctacccactctcacccgaatcgggccttccaagcccaggcacggccacgactcccagcagcattggctggtcgccccgtgctgtcccagttgactacggcctcaacccacctcagtggtactctctgccctttgaaaccatccctcccccggccgtctctcagtctccggctgctcccatggctccttccatcaatggatacctccctcatgtccagctctaccatcctcagtattaccacggcgaggcagagtacccccatgtctatgattccaagaactggaagcgcactatgtcgttgcaatatgatatggctggccatctggctgcccgggccgagcacggagataggaagcagatgctcccacagatgcagtctcatggccagtggcatcctatgtcaccgccgcctactcagtccggtgggcctcattccttgatgtgtgctccggtcatgccttatatgggccatgaccattatgtgcagaagcctccaggcattggatactaggtgctagcttgcactggcacccttctttctgttaaatatatatgatgttttgatacttttttttgtgtgaactatggtggtggttgtttgttttgtcatacccgatatgtttggttttggggagttgaaaaggaaactgtatatcttgatacctattgattaattgagcttgatgcatcttactgtgtatattctatactatacatatctatcaaatctacaaataaagcagatgttctatagatgccaagacctgtgagttacccgggaggaacctcggcatcttgcggggaagcccccccatatcccagccatagctctttttatttgtgacctcccctttcatctctttgctcaagaagtttagaaactgccaactaaatcccaatctacattctcactactgccaaaatgcgtgccgtccaagtcagcgaatatgtcaaagtacctataaccaacctcaacctcaactccaacccaaactaacaacatactacagggccccctagacctaaaagtaacgacagtcccaaccccgaccccaacacccgacaaatacctaatcgaaatccactcggccggcacaaacttcttcgacatcctccagatccaaggcaaataccaaaaccagccgccgctcccctggatcggcggcgccgcggtggccgnnnnnnnnnnnnnnnnnnnnnnnnnnnnnnnnnnnnnnnnnnnnnnnnnnnnnnnnnnnnnnnnnnnnnnnnnnnnnnnnnnnnnnnnnnnnnnnnnnnnnnnnnnnnnnnnnnnnnnnnnnnnnnnnnnnnnnnnnnnnnnnnnnnnnnnnnnnnnnnnnnnnnnnnnnnnnnnnnnnnnnnnnnnnnnnnnnnnnnnnnnnnnnnnnnnnnnnnnnnnnnnnccgggaccggcggcgccgaattcgctggaacagtcctcgccgttcccacctccccaaacaaccgctttagaatcggcgaccgcgtcttcggcgccacacaaggagcctacgcaacacacgtcctggccgcagagcaaacactcctccccgtgccggaggggtggagcttcgaagatgcagcggggctgttcgtcacggcgccaacctcgtatggcggtcttgttcagcgcgctggcgtgaaggccggggactgggtccttgttcatgctgctgcgggcggggttggacttgctgctgtgcagattgccaaggctatgggggcgactgtgattgctactgcggggacggagaggaagagggagattgctaaggtttttggggcggattatgtggttgattacactaataaggcgtggccggaggttgtgaaggggatttgcaaggagaagaggaagggaaatggggctgctggagtggatattgtttatgatcctgttgggatgattgaggcgagtttgaagtgtgtggcgtggaatgcgcggttgttggtcattgggtttgcggcgggcaagattgaaaaggtcgcgcttaatcgggtgctgttgaagaatgtgagtattgttggcttgcattgggggcagtatgccaagtttgagacggagactgttggtgaagtttggcggggaatctttgaccttgttaagcaggggaagttcaagggaacggcgttcaaggatgagagctttgttggattggagagtgtgcccagagctttgcaggcattgggtggaagggagacttggggcaaggttgttgtgaatattgttggtgatgcgaagagcaagctgtagtctggagcatccaggactacagtagatagatgtgggaaagcaatatattgattcaatatagatataaactgatgaatgtagatgcgcaaggagtcatgctctcgtagacaaagtaaaatccccaaagggaaagactcgagcaagtataacatgaactatgaaggccctttgcttgctctggcaactttcgtatttcagaagtgagcatgaacacccgaaggtacccagctcgcaatccagctccagtcggtcacggctacaagacgtagcgctgtggtaactgttctccagaaggagagcccttgagcatgtccatatggactgggacagctggattgaggagttgcggatgacagcacgtgtctggggtttgatatatatctgtggttgggttagtgtagagttttgtattgataggcaccataaatcagaataacattaaattcagagtaatggtttgaatgtcgaaagattgtcgagagaatgtctaggggaagttgacgaaaaaaagaggagaaaagggaaaataaatggcgatgactcagcatgtctataccgcccattttctgcctcttagaggatatctgcatggaaaatactccgtactatgggcacagtcgctattgttccaattccaaatgaaatggatcgttcttcactactaaacctcaatagaccttaaattcttttttggtcagctacagaaatttccactcttgtggaaatttcaaagtgcaggaactctactattagactatagtacaagaacacttcctggagaccaatgagaagtcattatgtgcagaacccttgctaaagttttttgaccaattgacggtcttttggaaccctttaggctactgacaagtaagctatgattagaccatttcagctgtagccaagatgtatataatagccacaactttccacaccgtctttcaccttctttcatatcacaccttagctcccacgattttatgagcctgtatcattgaaaatccaactttgaacaatatcaaagtcaacgatggtttgtgtagtcaagatcctggatgatcctgtcagggactcaatcacacaagtggacacgaacacatggcttatcggtcccttcaaactctatcgatcaaagggatattccgatacatctacctggtacgaccaagaagacgatctcagttacactgtcaccaacgcacctatcggatctcattggtgtatgatgctggggatggctctgccgtctggtctgtaggaaacagcgcgttttgcaaggtcaaactatctgaaccgggtataacaccagaggcggcaatagcgttcgtcgataggctcgtctgtgagaagaagcctggtttcgaggtccctaagctcctataccaaacagaatacaaagaccggtattgtctgtttttaagcagagttcaaggtcgaactcttggagatgcttggccttccctagacgaaaaatggagacatcactacgcaaacgccgtagtggatgtgtgcaagtttctcgcgagtcaggaatgtgaggaatttcgtggtgtggacgggaagaacgcccttgagccttttctcgtcaaatccggcgcggaagaggaatactctcctgataatctccggcaatttgtatataaatgggtatggcctgctcaaaatttgtgttctaccatgccgacctcggtcctggcaacatcatagtggaggatatcccagaaactggcactatcgatgttattgattgggagcttgctagctattttccaaagggaatggattcgaaccaagtttcgactaagcagtggaatctttcttgaaaattcagctacggacaagccaactgagtggagatcaagggttagcgtgttgcttggagagaacgggttcgaagactatgcatcgcaatagttgtcccggtttaattgctagcgggactgccattctactatagacaagaataggtctgcatcaaatatcaaaccgggctttctcgcgcatgctcctgaagtcgtagctctcatagccacttgacaagtctcacggaatacatggggggtgtagatagtcagccgaaggcttgtaggtttgagttatatgtttccatagactaaagcaataagctgtctctacgtcatggatggataatattaaagcattcgaagactagcccctgaagacacgtccgcgtccctgcatcataagacaatgttaaagacggtgtccttgagaaggcgaaccgcctatacaaacttgaccaggaaattacggtcagtgtttcttaatgtgtagcagtcaatcaataagcaccccacaaagctactgagataccatctaaagaataaaactcatgggccgaggagcaaaaactctagggtatcttttggagtatcttttggagtataaagaagctacctcgacaccgacggaaccaggtaatcaaatcaccgagcgatgagacaagtcctgcttactcaactcgtagcaaataactacaggggtgcagtacaattgtcctacccaacaaagagtgaccaattgggtccttcttccaaaatccagagaacaagaacaacgttacttatatataaaacgaaaggatcagaactacgtcaaatccacatatacatacaagtcagtcaccacatgatcattttgcaggtaccaccatggcccatgaaaacatatggtttcccgatcctttccagaactgcaagatcttgagtctgaacgagcctacaccttccaactgggaagtctcccaaaagatcaacgggcatgtcgagcaatggaaagacgctacctgccgcctctcctctctggcctccgccaagttcgtctgtcgtgataccagtgaatctcccaatgggcccacagccatcctccgtatcgtgaagcagattccctctaccaaagctcaggtagccgaacaatatactccaaccgagctaaaagcatcccaagccatcttgctcaggaagccactcaatttactctacccgagctaatggcataccaatctcccaaggaaagaaattcgcccaacacccctaagctcctagcatggcagcaagggactcaggatgcctctggtaccatcccaggtggctttatcacatggattatctttgtggacattgagggaatcgcccttggcgatgcgaatggggctggcatatattgggagcagccgccggaaacacgtgcaaaaatccgcgaggtcttcatgaaggaatacacgtaagtcagccctataaaagtttccgtctaggaaaaaatttggttattcctgtttttggatccctcgacttggcccctatgcttgcgcatgcttgcgcatgcctcgttgaactcctgattcaaagctgtttattgaggaatgatactaatacataatgattagtgaagcctctgaaattggaatcctaccagtccatgatggcctggaaatttgatatggaacgaggagaggggaacgatgtaagtcttccattacacaatgcgaggatatgatgcggaccaggttgttaacatgttgtattcagtcatttcgtgggatttgaagacccagaattcttccagcgcaagggtcgggtgacagccaaaatattccctcgctataatctatctaagactccccctggtgaccggtggtgggaatatgaggtgaacaaagatccagatacctcgaaatggaccttctagtcaaactctttgtttggacatcggttgtcttcatattagcctcttcgttttcgttcttcggtgctgatgctcagagacttgaggtatcatgtgatatgagactattagggaaggcgcatttgagggcaagtgcctgttctaggaagggagtgggggtataaaagaacttctcccacctttcctcctcttctcttcttcccctccccatctctctgaccaccatctctccgtagccccatgagacagcgtaggcagagggtgccgtagcacatgctgcttaacctaccacagggatcataacattaccatgtttgttatgaggtctatgtaggtctgcatcaaataacaaaccgagctttctcgtggaagttcctgaagtcgtggctctcattgccatttgacaagtcccacggaatacatgtagatagccataaccgagtactcttaggtattcaatagtcatctaggcagtaaatccattacactcaaagacaatcagctttacggtagtcatattttaattcacacacatttgattcaattaatctatgggaaactctctgcaagatagcctaaagatcgtaaccatcaagggcataggtgtaaatgcagaggaagaaatcccaaacacaaaacatggaactgagaggagagaaagtagcataacatcatggtactcgttcatatcataggtagatgtcaaatgagttggcgttagtatcatcaatcccgtaaagcccatcacacttaatggtgccgctcacacatctcaacgacagtagtccaaccctcacaacaagaccggctcatattatgtccacaccagcagcaggtcaccttgcggggtagaagaggcgcaggccgtagatcgggcatgccttgggcagcatgtgcagctggtaattgaccgaatggcagagatcgtgagcctgtcaacttgcgggtaccggtgtcgggctgtgttttggagcgcgttcggtccactttggaatctgagaccagacgctcggggcaggcgagacgcgcgtagacttcggagggtaggtcgtgccagtacttgcagcggcagcagattacgaagatcttggtgagggtttgtgggctgtgggctgttttcgctttttgggatcttctcttgaggatgctcatgggagctggtcgggcttgggggctgccgctttgggtacccggggggctgctgggctgcatgccgggatgagtgccatattgagggccgtactgtatgccgcgataagtatcagggtgagacgcgggctgctggatgggctgcaagacaggttggttgccaggttggatacctggcgatgtgttgggttgaatgagtggactaacgggagcctcatgcacgactggcgcttcgacagcggaaattgcaggactagtatccacgcgattcgctgaatcgcgtttgaattcagagggttcaggtgcatcttcgtcggcagtgtcataatttgaatgaccgtcatgggaggagttatgtgaaggacagcggctatgtcctggcatgagccctctaggttctccagcaagaatattatcctctgggggtccggtggaagcgtgagaataccgacggggagatttcgcaggaacggtgttactatccgacagatccttggatgttcggctgtttctctcaccgggcgaaacacttcctgcatgtactggagttctgacgggtacctggcagggagacgccgggatgtctttgaccgtatcggttgacgcagttggcattccccgaatctcgagactccgtctttcactcttgactggaatcggtggcatttcgaccgactgcgaagtttcgtggaagttttctttgaaacggcttgaggttcgtttgggggtattcgacaaagcggtaggcaatcgacttcttcctcgatcctcgggatgagattgcccaggagagtgtaatggttgggatgggttctcatggttaggtttgtgtaatgtcagggatcttggaatcttgaaataactctgggccgattcatctgtatttgcaggattcaacgcgaggggagacgacttgtatgctcgcgggaagggatccactcggttcatcctggcaaggtttcccgtggagtttgtttgtgctaggctgagtggttggtaagacttggcaccagatagagttgacggattgtctggagtttctgggggtgtcatttcctgtaactgacgagccgtggtaacttgagtaggcgaatccgaatgaccgggtgaatataagttaggctggctcaagcattgcgacattggcatgctagtagccctgacagaacggtcttgacgagtcacacgatcaccgggatattctgccccgggcatactcttcctgtcatgcttcagcgctgcagaaaacagctccttatccagatcgccggaggacactagtgtctcgccgtttctagcacagtttccaaccacggaccgagtaacagtgggaatctgctccgacactgatcgattggattcatgtccatccttcgtcctccaggcttcggctgtcttccaggcttcagccatcttccagttctcacgaaggtcatcagacttcgccgtggcgtgcaaccggttgtgctgggttgggttggacattttgttcgaagcggataggttcagtgcggtgccatgcttggactgtagctctcgggtgatagccgttccaaacctttccggtagagtcaacggaagagatggtgggttcgtatctgtcctaagctggttaaactcggcagacggatcttgatcactcgaacgtgaattccggcgtgatcgccggaatatcgaggacaggctacttgacgatttcggacgctctgcattcgcactggagcttctgcttgagctgctcactggttgtttcttggtcaaacggcgagagtttctgtcatggattccgatatcgccctgggattgggattcctcgagtgctagcaaccgcttctcgagttcttttctctcggcttctaggcgctttgtgacacgcttttctttttctttcttcttgggtctttccaaggttggtttggagatattgtctccatctccgtcgggatagattggcaagggcgtcatttgttgggttggggtatcattttccacaggtgccccgtttgcgactgatagacttgagccaggtgtaccagtggagggtaaacgagagttggaggagtaagagaccgagctcggccctgtctcatcgtacaaggagtgcctcgcatgggaattactatcggtggcctcatgtgcgagagcttcgcgggcgagaaagggaactgggggaacaaatccactattctgattgtgtcgtttcttcgaggggtcaaatgagattcctaggctcctccatattgctgttgttaacttacatccatagatttgccaaagacgcggtggatgtggttagagatggatgatcgacgggccctgcggggtggatcggtggggaaggtctccattgcagttggtaaattggttcagttgactttgatctgaaaagaagcgagagacattgaactggaaaacagtccagaaatcgagggatcgtggatcgtggatcgtgaaacgtgaaacgtgaaatgtgagagatgtaaggcgtgagtcgtgaatcgcaagtcaagcagataaacaaaaacgagagacaaaggccaaggccaaagaacaaaataaaacaaaaaaacgaaagcgaaggagaaaaagaaagaaaagaaaaaaagcagcgatgatcagtcaagaagcaaaggattccaaatccgctagcattggctgcatgtgaaaccttccaccgagctattcttagtatttttttttggtcatctgatctgtagatttatagattgtgatgtatacgatttctatacaatcctatatgtaaatctataaacctgaagagaaccacccaaatctgcactcggcccagtggaattccaaactcatcgaattgtgaaactcaaagcgtccgaggcccaaagaagttggagagtcacactcgccccccacttcgcatcaacatcgaaatctcacctctacatctccccgagaacaactaaagatactctgcctaatcagccttaaactgctatcggttactcggtgctacaactacagagaatacaaaactaagaagctacacaatgtccaaccaaccccacaacgacctcccgccaagctatgatgcatcacaacaatcctgggggatctccggcactaagccacagacaggcccttcagcctcagcaaacccacctccatatcacaactggcaggaagcagtcccagacacagccacatttccaccacccccaatcaccggctacctaatctcaggcacagggaacgcctccgaagacgacgcccagcgcgcccacgatttctgcaactctgtgcccctctggctcccagctcagccctcgtcggccgtctaccacgacgtgcaggtccacgatcttcggcccgtgcagccagccgagctgcgtggccatgtctcggctgttgcgcgcggccgctggcgaggacacagtgtcgacgggaacggggattgtgtcgttcttacccagctgcccatgtatttccctgctacggactcgccgtttgtgcgcgagcagaagaagaccatctactttgaggttaagttgctggcgctgagggcggggccgacgccgcaggattgtagtggattttcgattgggtttgctgcgcagccttatccgtcgtggagatcgcctggctgggagagaggtggactgggggtgttttcggatgatgggtgtcggtttgtgaatgattcctttgggggtcgggactttacgatgccgttcaaggtgggtgagacggttgggttggggatggagtttgagctaccggagaatatctgcagtggggataagcatagtaagagctgcaaagtgcatatcttcttcacgcggaatggacgccgatctgagagttgggatctgcatgaggaggtcgatgccgattccggggatgttgagggcttggaaggggattatgacctatatggggcgattgggctgttcggtggcgtcgatttcgagtcttgtttcgaccctgcaggttggctatggaagccggaatgaacgtgtggtatctgtgaagggtccacgcgggccaggccgtagggctgaagtggttttgctttttacttttgctgtatggaatatggaatatggctttgggggttccaaatgcttagctagtatagcttgacgcaccaaatcaatatgagcatgaagaagacaaagaagtatgttgtacatataaaagccaagtaaaaaaagaaacacgctaaccaatatctataggctatgtagtttgcacagcctatttcaacggccaacgccgaggctgcatagcgtaaacgagatcccgcacgttcgttctagaaaggtatttttaattttcatttattcttaccttcggctacaacaatcctagtaaatgcagcgcattagtggccggggggatgcacgaggtgcagttccgctataacgacggtccttgcgacgtccgatgagtagtaggtgcatctctgccgcttttccgtatggtccccggtctaccccagctgcatgaacggcatgaacggcaggaaatcgttttatttgacgtcagggtgcgttgagcgcattgcgatctttgtccttttgcatgttgatgtatagtgatgtatattttggcgttgagacacgaggattagtttgagttctttgagcatatcatggttgatagctatgtatatagatatatacgtgtatatgtacgttacaaatgaaaagatatatatgggcagggcatggtgaggctgatactcgaaataaatatatatagtagacgcgacggtactccgtacttactccggacctcatacaaagaaaagagcctggagaaatgcgcactgacagcacggagataagcctgcgctcggtgctcttctaaattgtcctgttcgcgaacgatgcgtctgttcatctaattgctcgtatctgcacgtcaatgacggggttcatagcgattaatacgaaagagccgcagccaatccccgtccgagcgttacgatttgaaaagccattcaagcccagtgccataggacaatatttatcagatttattttgcgcacctatatccggatgtagcattaggctctagaaacccgttaatattattaaaatactcttgtacctgtatctgaaatacataaaaaagccagtggagcaccaacctcggtgataatcccgagactaccagccaccaagcccctattactgcaactaacccaccagggagcggctagaatggcacggatgtttccacttttggatcagaccagttataccccggctaagatcatcctatttgcacgggggggggaactacacgagctggagcggatcagcttctacagctatgccactgccggatatgtgtatattcgttgtatctttccggttgttattcggagtatgaatccggtcctctccttttttcttactgaggggtaaatatggagtagcagaatcacaatgggtttgtgtccaggtatctttgtccgatccactgaaaaagttacgaatcctccccccccccacagccgatctaaatttctgagtaatatgctaaggtacgatagaaaaagagaggaactagaactgaaagggaaaacagaacatcatccggcttgaaatggaagtggccgaaagggaaatttggtctgatcgactgcatgtcatcgccccttttccccgtgacagtcgaggatcccgtttggccccccccccacctggacatttatttgatatcccggactgacttcgggtctatgcgtcaaacccacaacacccccctctccctgtctttcacaaatcataacgttgaaaatgaaatagaaattcggccattcccggctgtcggtggagttggagcgggttcaatacattactgggagtccgtgcagccgagatacgcgtttgtttcactcaagacgtgatctgggcacggccgggagacggtggttattctgtacgtccatttcggctcggccgggagagtaaatggagaaataacggggacaaggtacgggatatgcatatgcagagaaccctagatggaactgctgcagataagaacaacgaaaagaaagacaaagaaagaaaaggaaaagaaaaacgtctgaattgccacttgtataaccgagagagaggtggtcttagccatttgccaaaagtaccagattgcgattttggacgatcagaccaaaaggatatccatattcggccgtatgcagatacattaattccatcatctccggccgtgcccccatttcgctaaggctggaacactttttagacgccaaagcgacaactggcgcgaagccagcggttgtctctatctgtgaaaggaaggagtcccgggatgtacggagtacccattatgatcccggttagggttggatatatgttgatacgttagtatacggagtactcggagtatacttagggatatcagggatattactgaattgcatagatattagattcctatgctaataagcctataccaatatgagcacggtccagctgatttcgctttcactttcactttcattcacattcctgtctacccatgaccacgagatttaccttcacgccaccgaggcagctggttgcccggcattaaacgcgcaatcaggcaatcgaccttcgctttcgtgttcccatgttttcccatgttcccccccccgtttctccgcctatctttacaagctcttagtaatgcctgtatataaaatccctccacacaccgggtattgccccaccgcgagggaggaacagcctgttacacgggcactttaggcgatcgccaccaggattacccgtaattttgttttttgttttttttttagaagtaggactaagttacttgctataataagcatttggcttcaagttacatccaggcatcctgttccgaccaatatgcatcttacgtttaatctattaatcttgaaaagaaaagaaatgaggaaaaaataggaaagtattccacggtactagtacttttgaatttcgactccgttctgctgcgggccacgctaattagcaggcatgtattgtcagaaagcggtaattgttccacaaatcacctttccagcaaagctataggaaattatttgtccaacgtaattatgggaatatataaatataaaaatagagatatctaggtctgtgtccagctatgagttccggtcgactgggcaccaatgaagggtctttcgagttccgaggcgaagagcatcgtgcatggccggatatgttctccattggaattgctctttgtgttgcctttttgccggtaaaaagaaaaaaaaaatagattgtttgtatggtacttagcaagaaagtcgttttcttagggttgcattgcttgaaagaacaacactacgccgtaccaggtatctcatatgcatccaacccaaaccgttgcctattatccacgatcttatttggatctgatttttaactaatcaagttagcatcaaaagtaaaacagaaaaggtaaaaaagtaaaaaaacaagaaaggtacatgcatatgttccccacaggggtgagcatgctcatgctcagcatactccaaggcgaactttcatttggattttgaatcttgatatattcggccacatgagatcaaagcgaagtatgtatatacactatacatatacataggcatgtgcaatacgtaaaataatcctctgcataggcctccaatgcctccacccatggacggcctctagatccagggtctctgacgcacgaggcaaaaactacctgcagcacactcaaaacgacaaccaagactggggcatagctttttagctcagctattttttttagtgtatgttgtatttacttttcttggattttataattcttttttataattcgggagattaatattatttctatattatcttctgcattttgtttagttcatcgcatgtgctgcctttcttcctactttaatctctctctcccttcaatcgtactcatctcttttttcccttttccctcttctcttttcctttgacattgaaggaagcattgtctccttgacattcgttaagacttgctttcactaagcctgccgaggcaattgaccaccggactgggtcaataggtatagcgcattgaatgcttatacctccgcatcttcaaaacgaagagaatcccccctgaaaatagtcagagatacgtggggatcaagtttcacatcatggcattcccgtttctgcgagcattcgtcacactcttgtaagtatagattgggagctcaatcagaccactagctaacgagcaaccagtctttatcgctacacccgactcgtgttcaacctgttttccttttggacattcaagccaatcccaccaccggagaatcccaaattgacatcccaagatgtaacggtgatcattccgtcgttggagggttgtggcgatgagctggtggagaccatccggacaattctcgacaatcagccgttcgaattgctcctggtgacaatcgaggccaatcgcatcaaggcccagcagatgctgaatgctatgccagcgtcaaaatcccgaattcgtttgtttacagtggagcaccccaataagcgccgtcaaatgacggaagctattcccgaggtccgaactgccattacccttctcgcagatgacgatgtgagctggccacggactctcctcccctggattctggcgccctttgaaaaggacgagaaatacggtggggtggtgacctgccagcgattgcgccgggccacggcgccgagcctctcacagcgactctggggcttcttgggcgctttgtacctggaacgacgcaacttcgactgcggcgcgacgactaatgtggacggtggccttccctgcatgtcgggacgaacggttgcgtatcggacgcgaattctgcagaatgaggccttcacctatgcgttcaccaatgaggagtggtggtgggggaagtaccaactcaatgccgacgatgataactttatcactcgctggatggtctcgcacggatgggaaacttatatgcagtaccacccagaggcggaggtgctgacaactctcgaggacaaccctcgtttcttgaagcaatgcgcccgctggtccagaagtaattggcggagcaatttgacttcgatgtttcacgagaagcacatttggcagtgagtgcaacttttcctttctttcctcttgaattgtcttaccttgactctcttttttttcccccctccctttgtttgtttttctctttgatcgggtcaaaaagagtctttttggtccgagtcttggtgtgacattggaaacaaagaaaccacctgggcagaatatgcagaacagagctaacatttctatagtcgtcagccctggagcgcctatgccgttcatttgaccacgttatcgccacctgcctttttgggcgacattctacttgtctggttgtgccacaaggccactggatcgtggggagagtccttgcacgatcaatccatgactatgctctacctctggatcttcactagcaagtggattaagctgctgggccattaccttcgctatccagttgatgtgctgttgctaccagtatccatcattttcggttatttccacggcgcaatcaagatgtacgccgtaatgacattgaatgtggtatgtttaattctttcatcttttgattcttttcatatttggcatttccatttccttttccctttttccttatctggtgcatatacggcaagtgtatccaagcgtagcccctctcctatgacaactcagcatcacagcgctttgatcgtctccttgcagctctgtttacccactattctcctatttccccgaattatttgaaattgcacagctctttgccgttctgatttgatctgcctttttaaaattgactatccgagagctggtctaactttgccttttttttcacagacaacatggggtagccgtgatggcgccgatgattatgatgccgagcgtatgaagaagcggacggatgccgatcgaatgaagcaaccgtactatccgcaatatctcattaaatgagttcttcgattttctatttttttttaccgaagatccatttcctgttcgctttcggggattggtctaccatgtccgattgtacaacaggggagaacttctagcccattgacttggccctttatatcatgacgaaacgccgtgacgacacctatgctttgttttgttctagatctgccctggttttttcttttttttgtcaaccctggccattccgcctgcccaagtcctcgagagtacgagcttcgaagtggtcatgctcttctccctccaacgaaccaatgggtatagcgtctttacttcttctgcccaatgtttttcctttcttcgcacatggttgcctggttatcaaaaacaaaatggtggtctcgatcgaggccttttccccttctcttcttgtaaattacaaaagcatgggcggatctcgttttgggaatgttctgtgacttctttgcgtttcagtttgcttttcagctttgattcccctgagtttttctgtgagagcttttgtctactctttttagatgcaaggtggtattctggaactttggttgtttctctcctgttttgctttctcaaactgcagataatttctaattgattggaatatactccgtacgcatatttgtccagggataggaagatatagccctaaagctacgaaggttgtacttcggcgaaataatggatgcatcctgtcatagttcctacttctggtgccatgcagatgattcggtctagaaccaaccgaaagagggttgaatgtaagaaaatagtgtcaaaataagctgatcattgacataggtacggagtatataatattcatgtaagacaaggtatcccgttcggattaagatgtggcgtggcgagccaagacttttcggaaatgttcgagttccaaacaactccaacttcgaatccaggaaccaattgtccctccaacccgcgctttcccaaatataatccattttcaagggcctggtactttgttcaagatggtggctttcgctcgcgctgcgctgtcttcgcagctatccgccgtcgcccgtccagtctcgttatgccgacgcatccactcgtctcacttcagatcagctgttgcacacccaatcactgctcacggccctcctcctaaagccccagagctcaaggaaaagtcaaaaccgaaggaggcggagctcccagcccccgagggtgaaggatcgcgatacaacctcaccgctgcgttgaggaagcggttttggaaagatgtccatgtgcatggaaagtcaggtatgaacgataaaggcattggctgtctttctcattgattgaccccgtccttcggtgaatactcatcagctaacccatatctagacgaatatcaagtcctgctggacaagcgacccgtccgaaccccgacgaaagaagtcctgactattccctccacaaagccccacctcgcccacgctattgcactggagtgggatgtgatggcctccgcccaggaggctcttaaaagccacctcatccctatgacctccctcgcagcccgcgccaccgatatcgcccgtgaagatgccgagggcaaaaacaccaccagaaaacagattctcacaaccgccatgcgttacctagatacggataccctactctgctgggagcccgagcgagaaatgcacgtgctggagcggacggcggccgatggaacgcccatcgagagtcttcgccagattcaaacgagaattgccggcaacgtcatgagctttttgtccactaaggtctggcctggccttgaaatcatccctatcctcgacgccaatagcattcttcctctcgcccagccgaagggtacgaaagacagtatcggcacttgggtttcgggactgtctgcgtatgatctggccggtctggagcgcgcaatcattgcttccaagagtcttctcattgcggtgcgcctggtggtggaatggagtgagaacttccgccatcttcagcgacctgagacgaagaggttcggtatcgaggaggcggctgaggcgtcgagtctggaggtgacctggcagactaaccaatggggcgaggtagaggatacccacgatgttggcaaggaagacttgaagcgacagttgggtagtgttgtgatcttggttagtggagagactcggtaagctacgagtgtatattaggtatactgtatgatagatatagatggcatgaccatgctttgtataaatgcgtgtattacaatgaagactaccatgagtttcaccatattctgtacaaaaattggtaacatactgggacaatgtagagatcgggtagggcttagtatggtaggtacgacaggtttgggtttttcgccagaaggttaaccagctgccatgaatcatctatacatatatgtatgtagcctcttaaataagcctcgtgatttccaagctctccgcgtgattgttctgtgacaaaccagcatggcctaggagtatcctccgacatggtgaggagactaaagaaagaacgaccaagaagggccaagttgttgatcaaaaggtaagtctatccatacctagtaggtgtaagtaatatgtcataaatgtaaagtctagctctgttataaaagccactttgttatcgtttttctggatgtctttttcggtgtcttttagaatataaccgctaaccatccccaattattgttagcaggggacctttgatacgagctttttctagacatttaagaggctacatacatatatgtataatgtgcaaccgatacggtattccgatatgtaggcaacgtgaagtatgttaacgacgtttgatttatatttcccctactagttactaaaagattgtataggttattttccctcatgaccatactaagaccagccaacgactatttatcaaacgaggcgatctccttgagtcgagggtggatcatcctaatgggctacttgagtttgatattgatcgtctacgagaatatgcaacttgtgccctctgtcgtatggaccttactcccgcgacttaaaggttctcatgcttagctggcttgtggcttctatcgagggcccgagggcgttcgacgatattcaatgacttgatgtttgcattccaacataatagtagaaatcgtaattagctcacttaaccctatgcattcttggctttgaaggcaagaagccctctttctatcccctgttctggcgtagcaattgattcaatgcacggttcctactatcgctatcatgtagagctttgccatctacaatgcgaattgggattgcagcctagacgattctatacggagaaaagctggttgttcattgacatatgagaatggtgtaaatgctgcagctgtactacttgtatctcccgttggacatcggatggttattgctaattgagcaagccaatcacttattctgtcatcatgaagctattcagagatcacttaactctgactttcctcttaccctatcctttgcatcactggtcaacagaaaatgtcatccaccgctaaggctcagtatatgtggatagacatgaaatactgaagccatcccaccgtgttggaccaaatctagcctactccctgcttttgcgactatgccctcttaaatgcgagagatcatactaaaagcataaaaccacgcagagggtaccctcaaacaactttcacccgaattcatcttttcgcccgagactctcaattattgcccgatatcgctaaacagattttagtaactaactgactagttattaaactaatgttggatgcctaatgaataaggcacccagtggggaacgaatatctttgtccacttcgtgctccgtacagagtagatagatctcccattctctctcttcctaccctgagaaatctgaacatggtccctaaaagccctcgtacacgctattctccttattcatatcgtactcagactctagagttaatcactcttctttatgagatctgcctaataccgtcgagcatggtagtaccattattaaaagcatagtgtagatcaggtgatctccaaattcatggtacggtcgtaaggcagatatcttagaccggaagaaatgctgctgacgcttaggcttgtctgtcagttcttctgctctaccttacttttcatagtggtgtactataatatatggcactcgtactgaaattaatatgcatggagacttcgcctaattaggttagaccgccgtactccgtagtaaaatcgagactcgaggggacccctacactcatgccaaggcggagttcagcaccatttgccccccaaaaaagggcccgaggccccctcgaatttcattccaagtcctcaactttgagcagacaacattcaatttaatgtgttggacatagtccagtgtgctccaagtatgtctgatatacctgaagagtaagtctttgttcccctcaggttggcactagaaaccctcgacccatggttcgcatcatgacagcggggataccttggcttcactgccttgatatatctgtcctgagcctgcaccctttgaagcagtaacatacggtgcccacagtgcaaagtgtacggattttacacacaatttgtactgacatgccactgtctcgcaggcacaaacacaaacgctctcgaagcgcaatagcactttccctcctccaccgcgacaagtccaaaggcgaagataaagatcccgataacaacgtagacaccaactcgcccacctccgcctcaccaagcccgggcccattgaaacacacccacagcagcagcagtcgccatagccgtcgcaaaccaggccaggacacaagttcgccacccgccattcaagaatccgccgaggatatggacacagtcgaagacctgccttccttgaatcaaatagagactggcagcatgtcgctcgaacagtccgttcgcacctttcgtctcttcgagatcttgcgcagcggcgataccaccgctatctccaaggccatcaaggataccatcgacccgcagggtgtgagttatctcaacggcacgaccgtcctccatttggctttgcaatgcgccgagccccaggtcgtggaatatgtgctgtccaatgcggaggatatcgatatcaactcgcgagatcgggatggaaacaccccacttcacattgctgcccagctgggccggggcccgcttgttcgcgatttgctgaatcgtccatcgatcaatgattccattgtcaactatcgcggtcagacgcctctcgatctggcccgtaccccggaaattttccagcagcttcagcttgcgcggtctctcttcatcgatagcaagaaccaggaaattcaggctttgattaaaaacgctgattataagggcttggaggctttgctggaggaacctcgagtggagggtattatggatgtgaacagctacgacctagttaccgacccgacgacagcccaatccggcggcacgcttctgcatgagggtgctagaagtaaagatgcgcagctcattgaaatccttctgacgcatggcgccgatcctttccgccgtgacaggaaggggaagctaccgcaggatgttaccaaagatgataaaatccgtgctctcttgaagagatcacccgctgctgctattgcccagcgcggtattcaggaaagggctattcttggaaatagtaatgcccaaggccttgccgggcgcgtttcgattggtgatgccccgcttgccggcaaggatgctcgcgaaatgagaggctatctcaagaaatggaccaattacacaacgggttataagttgcgctggttcgttctagaggatggagttttgagttattataaacatcagggtaagctcacggctcatcttcagtttcgcatcacccctcgtgccgtcgacccctgctaaatttctctatagacgatgccggctctgcctgtcgcggtgccattaacatgaagattgctagacttagcatggatgcgcaggataagacgcgttttgaaatccacggcaagtcgtcggtcaaataccacctcaaggccaaccatgttgtggaggcaaaacgctggttctggtctctcaacaatgccattcagtgggccaaggacgaagcgaaggaggaggagcgtcagcggtccaagaacgcagaagtgcttcgccaggctaagatcgatcacacagaaggacgtcctacagataccccatcagagtctggtctttctcacaagcctagcacaaagaatctcgctcctccgtctttgggcggtggtagcagcagtggcacaaggctcagtacatatgcatctcgcaccaccctagatactccagttggagacgaggacagctccatttatggcggttcttatgaccacgtccctgctccaaatgacatgaacagagtagtcagtcatgccgcatctacgccggagggggagggcgatgatgaagaatatatcgactatggttcaagtcacgataacgacatctcagccgctgataaagatgccctcaatatcaccgcacaatctgcgaagcttcagttggatcttcttgcaaatgtggcagcctcgctacaagccgagaaatccaagaatccgcaaatgaccatcgcggatccagccctcgaagaggcactcggtgcctacgaagccgcagtcagcagcctcaagggtctagtgcagaacctgctgaagatatcacgggaccgagactcttattggcagtctcgtcttagtagagaggagtccattcgtcaaatgtgggaagaaagcatggcccgcgtggcccgcgagcacgaggagctgcaatctaagatgggcgagtccgaggagaagcggaagcggactaagcgggctctgaaggaagccctggagagcgcaacaggcagtagccgttctatcgtcggtgggacatcccgtttgccaacagagagacagagtcttgaggccaaccaaattgaagctggggctaccgagacagataaagcagagcagcccacacaggaaccatccgaagtacccgaactgtctcgcaaaccatcaaactactccgagctcagcagtctctgcgattcagaatcggacggagaagaattctttgatgctattgatgccggtgaaatcgaggtagaggatgtcagcaataccaagaatatcaatatggaaccaccgaaagacgaaagtgctgagcttcgggctgtgaagagtaccctcatcgcaccatcctttaagggttacgaggatcccatcagagagcgacttaagatggatgctgatgatcggccaaagatttctttatgggtaagctgtgaagttagcttctgtttttttctttgccagtgctaaccacaattttagagtatcctgaaatctatgattggaaaggacatgacgaagatgacgctcccggtgtccttcaacgaaccaacttcactacttcagcgagtggctgaggatcttgaatataccgacctccttgacatcgctgctggtcgggccgattcaatggaacgcctggtctacgtcgcctcctacgccgcaagtgagtatgcttcgaccatcggccgtgtcgcaaagcccttcaacccccttctgggtgaaaccttcgagtacgtgcgtccggacaagggctatcggttctttgtggagcaagttagccaccacccaccgattggagctgcgtgggccgaatcgcccaaatgggactactgggtaagtgcatccgattttgtaggcgtatatctgttaccagggctaacccaaactacgtatatagggtgaatcctccctcaagtccaagttctatggcaaatccttcgacatcaacctgctgggcacatggttcctgaagctgcgaccttcctctggtggagaagaactttacacctggaagaaggtgacctcgtcggtcattggcatcattactggtaaccccacggtggacaactacggtttgatggaaatcaagaattggaccaccggcgaagtctgctacctcgacttcaagccccgtggctggaaggcctcatcggcctaccaggtgacaggaaaggtcgtcgacagcgaaggctctcccaggtggagcatcggtggccgctggaacgataagatctacgcccgccatacccccggcttcgaggcacctgtctccggccaggatcccgagtccgccaagacattcttggtctggcaagctcatgaacgtcctactggtctacctttcaacctgactccattcgtcatcacactcaatgctctcccggacgccttgaaggagtggctacctcctaccgataccagaaggcgaccggatcagcgtgctatggaagatggtgaatatgatttggctgctgatgagaagcaccgcgttgaagagaagcagcgtgccaggcgcagagaacgcgataccaacggcgaggtctacgagccgcaatggttcatccgtgacaagtgtcctgttacgggagaggagttctgggctcacaatggaaaatactgggagtccagagatgcgcatgattggagtcgatccgaggatattttctgagaggtacttgttaatttggcttggctgctttgtacagactctcaattgtcataaataaacgaatgaattctgaataactttctcgtgaatatggactcaaatgagtaaaatcgggtagtaaataatatatgtttcggtagagtccatctaatgaatacaataagcctgacgatacaagtttcatagatggtcgttatcagtcacgtgtcgccgcaaaaacatccccagagctatccgtggtctgatcggttcccctccacaaccaattgacatcgcaatggcaggatacacttgtgtccagtgcctacagaccctccgtaacggagtccgggcctcagctcctcaggctcgcttgcagagcctcgccaccgcgcggagaagaagccccatctccccgtcgttcatccgcagctttggctcgcaacgcaacagtcgatcgctgggcaactcccaggagcagccccagcatacccacagccagtcctgctgtgcttccaagtcctcgccttcgcccgtcgcgcagcgggcagctcacacggcaacctccgccgtcaaaactcggctcaaccctcgggccgtcttgaaacctgacaacctgttccactccttctcgaactcgccctcgccggcaattcgcaaacgcgctcagttcatcaaacagaatgccttctgcccccacccaagccaccagcagacccgcgcgcccgtctcgccgcacgaccccgaagccagaaaaaccaccgatgttgcaaacctgcccccggctcattcgcacttcgagtgccccgactgcggtataccagtctactgctccgaggaacactggatggatgacttcgaggctcacctcgagatttgcgacactctgcgccagatcaacgaggatgaccatgacctgaactccggccgctccttcccggaattcaattaccccggtcctcaggatgataacttcgttatcaacatgactaactgggatactttcctctatacccgtgaattcccggctatcaacgacgaccgctccatgcgtcaggttacccgcatgctcacctacccccagacaatcggcagtgtcctgcacgagcttagcccgtacagtgttcgttccggtggacgactcacaccggagggattgaagagtttgagtggtaagtcctgacttctatacggcagtagaggactactagcagcatctcccacacagcaaactaacccatcctcagccctgcgctactccctccaccccccgaaagctggcgaaggcattgacgtcaagggtctccgcctgaaggcgcctccagtgcgaatcttcatccttggcgcccgcgcagagtcctccctcccccgcgacgtctggctgcagttgcagtacatgtacccgcgcgccctgctgcacctgatcttcatcggaccggagagcatgacgaatcgagacggggagtatccgcttcccgagcgcacgcccgaaaaccccttcggcggtatcgtcgaggacagactcggtggccagatgaagattactacttacgtggactacttccacactatgaacaaggcgcagtatttcggccccttcgatccttacctggattgtttcatgctcttccaccctggtctgggtcacccggctagctcgcatgagtgggaggagacactgccccagttgcttgagactaaggttcccatcatctgtacagggtatacgcagtgggatctggagcgtgatatcaactgggtgagtgagaagtgtcgtggggagtttgatgtgcttctcgaacccggggagaatatcttccgcagtctgcgctgggatctgaatgatcaggatcctcatgatgtttcttgtggaaactggggattgtgggccttccgaggcaagaggtatgtggtgtcttttactgaatagagggatgttgactaacttgctctgcgacagatacgaagctgctttcaccaaggaggagtaagctagttgtgcctctttccttgctgtacgatattttttggtgcccgttcttggggtcattttagtagataaggttcagtttcagtcctctccgaagttattcacgattatcgatgcgcttgatttcagtcagttcgttcttgtcaagcatacgtagatgaagccgtagctaaggtcttagtgagaagctaggaatatgtaaagactaaacgctccgggcatagttaattgaagaaatattacgattaggcacaggtcaggggtagccgcaatgaattgtatcaattgcacaaaaagtagagctcgtcttacactcgttaagtaacagtagtatgacatccgaaggaaaagatgcaagcatcaatgcagggacagaattcaaggtcaaccaagacagaaaggaagtagcatcaagatagaaaaaaaatgcttggatgagatcaaaaggggagtatagaaggtaaaagaaaagggtataaacatcggaaaatcggaaaacacgtgtcaaaaccaccgtaaccagaaagcccgtaaccagaaagcaaggttttaaagacggtatgtcaagaagaaggaatatgtagaagaggaaaatatcccaaaatgaagacttgggaaggatcaagtggggaccattatagatgggcccgatgtgacgaaggtcgacaccaagattgaggggttaactcgaacatttttcctcaaacgagtcaaggaattgagtttagatcaagagaagaccagcaatggcgcctgcaccagcagcaatgaaaccagggaggtggatggaggcagcaccagcagtaagaggtgaaggagtagccgaggcactctcactggcgggggagctgctagtagccttgatcaggggggtggagctggcaatgtggctcatggaagggatgacgctgagggtgggaatgctagtgatgacaggcgtccaggtcgacgagggagcttcagtcgaggtctcaatgggggtttcagtcggggtttcaatcgaaaccgagctcgaagttgaggtcggggtgggggtcggggtagacgacgggggaggagtgtagccagagggcaccagagtgatggtcttggtgatgcagtcggctgtggcagattcagcggcgaacgcgacgggcgcgagggccgagaggaagaggagagccttggtgaactgcattgttgatgtttgttgtggtttaaggttatgatattgagagttgagagttgcgaattgcgaatgaagagtaatccgagtcaaaagagtgaatgcagcttataaaagagtgtaatagctgggagaacaaaagagtgacactgtttcaaacaggagaggttgcaaattaagagagaaagacaggggagtaaaggagaaggggtgtaggccaaggccaaggcgcttgttcaaggcgcttgttcctttaggaatgggccaggtacccaggcagcaaggcatcaaaggagtaagcaccaaggcatcaaggcatgaagggtccaagactagtccgaattaggtatacatatatactaaagtcttcccccttttcatagttatatcttctataaagactgaagaagcgggtgaatttacactattatcagacagtaaggccgtacctcctgttcttagcttcattgtcacaatctagattgtatacggagcacagtttcaggtaattcaatatcaccttgacattatgagaagcaaagcgcttatagatataaaaaatactgttgtacaggccaagggcaagttcccaaaccggggtatcaaagtaacagcaaacaaccatcccaatcatccttaatcatagcatcaaagctcatcgtcaacacaggccagatagggccataataacccagcagtcagaaagcaaaaacacagctgtcatttagaatccccatacggcggccactaccacagcaactgtcacccagtacccgctagcatgcaggaccattgcgacaggcccggatgccgaggaagtactagtcgagcttccgtcagcggcagtggtaccgttgggcaaggtaccgttgatgtagatggtctgggtgccgttcacatcgaccacgcgcacaagactcgagttcttgggcacggtgccgttgaagagggactcgtagtatgtgctgttgttgttattgtcgcagccacactccgagtactgctcgcacacacagacaacggggagcgactcgttcttgtgggcattgttattgtagtagttgtagtgctggctgtaggggtaggcgtaggcgctgtacagccaaagacccgggaagaaacccagtgcggctccaccgagcacgtagggggcgatgcctccagcagaccgcgagccagacgtgtagggagtgcgcgcaccgccagcatagtagttgcctccaccgtaggttgctcgagtgccagagccggcgctggttgtaccaccagcattgcttgttgaaccaccgcgactgctgccactgcttccactgctgccactgctgccactgctgccacttgagcccgaggagccggaagaaccagtgcggcctccactgcttcctccactgctgcttccactgctgctgccactgctgctgccactgctgctgccgcctcggcctcctccgccaccgccacgccgtttctcaagcgttataatatctgagctgtcctgggtagagtccagggagtccacatctcgttcaataagatcggtagactcggtttgagggatagtcagggataaggccctggtggaaagtagaaggagcgttgtcgcccaagtgaacttcatgatgaatccgggacccaagtatcgagtgatagaatagaagaatagagaaacagaagatctcgaagggcgtgagaatcaaaggaaagtccggtaaaagcgaattgaagtagagtcacggtatgacgaaattccgaggaactccgactcctcaagggatttcggagccttttaaatctttgaagtgctaagagtccttagagttaagcaattacagcatgaatcttaaaaagaaaattcatcaaagccaaaccaactcagcctcggaccctgaccctgacccgcacccctttagcggcccaagagcggaatacgaaaacggtggtgaatatttgcttggcatataccggtattttgtatgttggagacatttgtttcaatataattgtgctggatgacctcatggggtggctatcttccagtatacactttgcttcgcctcattctgtgagccctcgaagttggatattacttcatgcaatcttaaaccaacggcgctcatctgcgccccgtaaatggaccaagaaatgagtttctaagcctcaaagtttcgagaaaactctccacaacatataaatcctttgttatagagtaagatgaggccgtctggtcctatagatcaagacaagtgcgccttgtttcaatatttggcatttcagtggttatcaacttattccctttctaatttctataaaagatgattccagctttacatttgaggtttcatagccaatcaatagggcattgttagtagttagttatcaatagatagtcaatagttagttactacgtcgtcaaatagtgggacatcaccggtcggcacccaacagctttcgcccgagtcaaagctgcctttctctttatttcccccaagaacttatttccctctcatggcacgtcaaagaggtctttcaaatgcctcctccacttcatccctccccgaccaagtacaaaaatcccctattcgtgacccggcccgcagaccgctaatgcaatcctaggaattggggagcatgtatgattacctcgccaaagtcattctcctaggaccgagcggtgctggaaagtaggtatcaattatatcgatatgcaatatggtatatacaagcttagatcatcttattgacacccgatccttgtatcacaggtcttgtgtactacaccgcttcgtgaaagacgaatgtacaaccacccctccaacctcactctagctccccctcactgacacatcttctctccagggcgagtactctcctctcagaccatcggcgtggaattcgcctcgcgcatcgtgaaactcggcacgggctcgcgccggagacgcatcaaactccaactctgggatacagcaggcacagaacgctttcgatccgtttcaagatcgtactatcgcggcgcagcaggcgcaatcctcatctacgatgtcgcttcctacacttccttcgcttccctgccgaccttcctcatggacgcccgcgccctagcttccccgaacttatccgtcatcctggccgggaataaagctgacctgacctccgacgctcagtccgatttcgaagattactcccgcccccctccgactccaaccccgtccagtatttccagcagacagtcatctatcccttgggatgcgaatgggtcaattcgctcgactagcatgatgggtacggggactaggttgacggctacccgtgcctcagagggcagagaggtgagctccgaggagacatcccgctgggctgccaagtcgaatatacctgtcgctgtggagatctcggctctgacgggggagggcgtggaggaagtcttcaatcggctggcgcgtatcatcttgaccaagatcgagctcggtgagatcgaccccgatgacccgcagagtggcatccagtacggagatggaggtctgtatggcggcagtgatgcttcaagtatcagaagtcgggcgacgttggacgataattccgtgccccttcagcgcaggaatccccgtcgaaagggcaaggctcctggcacacctagctggaagagcgggatgagggaatgggaggatgtcttccgcttgggctctggaagtcgccccaatcaagggtgttgctagtattgtggatcattctacatcaccctgggtacatttgtttattttctgttttgatttggtctttggtttactacactgcacgataccccctcgttgaccttgatcattcaaatgtttctacatacttgttactttatttacccgacagctcagacctccaagaagaggaattaattgcatataaacttttgattcatctctcgttcaaaatctgcccccaaaacaacgccccgtcatccccaacgtttcgtctctcgatttatacatcaatgccagcaatcaaggtcttaatgcccttgccagccttgacctcaacaaaggccttctcagcatcctcgaacttcactgtatcggtaatcaacttcttgacatcgacactgccggacgcaaccagcccaacggcaagcttgtagtccccgctaccatatcggaagctacccttgatggtcagctccttagaacaagccgccatgatggggaatatgatctcgctgcggcccatgccaccctgtacgtatgtgcctccgttgcgcaggacatggatgcccgtgtgcacggaaggctcagcgcccgaagcgtcaatagcaacatcggcaccaaggccgagcccattctcctgtctcagacgctcagcgttctcagtggccgggacatttttaggcatgaatgtcgccgtcgtggcgtagtccttagcaaagtcaagacgcttctgttggatatctacgacgatgaccttggaggcaccgaacgcagtcgccacggcgcagcacagcaagccaacagggccggcaccgaataccaccaccgactggcccgggctgactctagcttggcgcacaatgtgcaccgcgacactgagaggctccatgagcgctccctcctgtagggagatgcgctcggggagcttgtagcagaagtcctcggggaggacatagtacttggccagggtgccgtcgtagggcggggtcgcggcgaatctcatgtgctcgcacaggttgtactttccggccttgcagggctcgcatcggcggcaggggatgccgggctccatggcgacccggtcgcctaccttgagggactggacggccgagccgacttgggtgatgacgcctgctgactcgtgtccgaggaccatggggtctgtcacaacaaatggaccaatcgatccttcttcccagtagtgcacctgttgcggggattggttaggctggtgggtcatactgttttcggggcatacatacatcactgccgcagataccggtgtacttgacgttgatgagcacatcgtgaggttctttcagctcgggaattgggcggtcttcaaaggtaaccttgtggacgccctggaggatgaatgagaggttctacatggctgtcagacttatcctgtacgtcattctcgacagtcctacctcaggtgtggccattgtgtatatttagaggagcaacggtgggaattccggggaaatcagcaacggttgggggatggagggaagagtataaggagttaatggagattctacacgcaagagaggaatatatatctcgaaaagataaagggatcgggagaatccagtcgaattgaattgaaccgaacaacgcagagctccccgcaggtccagacaagttccactatgtggatcagcctctctttctcttttagccgcgatattaaccggctctcggggcttttggcgggattttctttcctcgatgaagtcacaagaggcaataaacatcaggccatgtgacccgccagtggccgccacttttggtcaagtgacgtacttgatttggataactatatcttcaatacttcgtataggatacaaatatatatgtatggtacttgatataagaagaggtgatttagttcctaattaaaacaacacatataaattcagataagatactactctactactacggtgcaccttatgtagtattactataggtagatactatgtattccagggcttgtagacctttctcagccgaaagctatcggccgaaacgccaagacccggggattttgtccgtcctcaagctctctctcttccttcctctctcctctctctggtagcttagagcttcacttcttctacacattgcaatggtattcaatgccctcgccctcggggcgcgtagtcttcggactcgaccatcaccccgcctggtgcgccatttcgcagcttccgccaagcaagcaaaggaaaaccaatcattcaagagtcaactatatgaaagcacccagcagcgcttgaagcgcgagcgtgccgaacaggaaaaattcgcccaatatcagactcaatctcccgcgggtcgctctgccgctctgatcttcggtatgcaaagctgagataacttacattgtcctctggatcggtcagctaactagacctgcaattgcgctgtagctttggttttcttctcaactggtgcttactacctcggatccctcaagcccgcagctctgccaacgacatctacgactcccctctctgatatcgggcccgcaaaacacaacgtctctatctccaacctccaggcagcgtgggccgatttcgtcgagatcttgggcaaggaaaatgtttcgacttcagttggcgacgtggaaatgcattccggatccgattggtcctcctacacaccgaaagagggcgagaagcccttcttgatcctctacccgtcaaccaccgaggaagtctcgcgcatcatgaagatctgccaccagcgcattatccccgtcaccccgtactccggcggcacgagcttggagggccattttgcgtctactagaggtggcgtgtgcgtggatttccgtcgcatggaccgtatcttggcgctccacaagcctgacatggatgttgttgtccagcctgctgttggatgggaggagttaaacgcggagatcgccaaggatggacttttcttcccgccggaccctggtcccggtgcgatgattggtggtatggtcggaacagggtgctcaggaacgaatgcctaccggtacgggacaatgcgtgagtgggtactgtcgcttactgttgtcctcgccgatggcaccattatccacacccggcagcgcccaaggaagtctagtgctggttatgacctgaccaagctcttcattggcggcgaaggcactcttggtctggtaacggaggcgaccttgaagctgacggtcaagccccagagtgagaatgttgctgtcgcaagctttggcaccatccacagggctgctgagtgtgtgaccaaggtggtggaggctggtatccctgtcgctggtgttgagattctggatgatgtccaaatgaagtgtatcaatgcaagcggtactactagccgtcagtggaaggagtcacccaccctgttcttcaagttcactggtaccccgaatgcggttaaggagcagattggtttggtgaagaagattgtgtccacaacttcgggaaatagcttcgagtttgctcgtgatcaagacgaaatggcagaactttggagtgcccgcaaagaggcgctgtggagtgtcctggcgatgaagaaaaacccggatgaccacgtctggacaactgatgtcgcggtcccgattagcaggttgcccgatatcatcgaggcgaccaaggaagatctgaccaagcatggcttgttggccggaatctgtggccatgttggagatggcaacttccactgtaagttattgcctttatactacaaagtcgttggacatgtattaacagccgacagcgatcatcctcttcagcgagactgagaggagcatagccgagggagtcgtgcaccgcatggtgaaacgcgccgtggagatggagggcactgttaccggagagcacggtgtcggtctcgtcaagcgagactacctcgagcacgaggttggtgtaactacagtggacacaatgcgccgggtaagtcttgacatacattctcattcaaccccagactccaaatacacctttgtctacacccatggagcataccactaatactcatatctgcactagctaaaattggctcttgatccactccgcctgctcaattgcgacaaggttattcgcaccgaacaaccggcccccggagagatcaaggaatggtagatgcctcgcccttgacaggatttatatatccgagacactgctgaggctacctactccgaatccgaaccggaatggtgatgatggtggtgtcggcggtgtcgatgacgttcctcatcatcgctgccagagcccgaaccgtgtctggggcgctcctcgccttcatattgtcgttcggggcggtaaccatcaccgccctctcgctcaccatatccttcctgtggccgatagccggaattctcaaattcattgtagccaggctgcggtctaccatatccggaggactccctgtacatcgtggttaatatatgggactagccaataacaactgatgaagtcaacttactgtccatattcctcacggggaggtgggcctccatatccatattgtggctctgtacgctggtatgggccaccttggtagatttcccgtggctgctcctgatagtaactctgactctccgactggtattggtggtgctgctggcggaaattctccgctggaggtgcgtagccggagtactcatcgcgaggcgggggtggttgttgatagacagtttcactttgatattcgtatccgtcgggacgaggacggtattcttcgtggtgagccacgggctgaccgtagcctccgtagcttggttgtccatatccgctctggggttgactatatccgctctggggttgactatatccactctggggttgactgtaggagtcccctccatattgctgctggctctcatgttggggtcgactctggtaagaattcccgctgtcatagttttgaggctctgggctctcacgatcaggctttgagccgccgttgttgagaagcatagagcccatgcctcctacgagtccaccgagaataccgccaaatgcgcttcctcccataacctcggaggcaagattctcaatgccaacggagtcaccggacgcttggcctccaccagagctgccttgagccttgggaagagcgagcggcttgccacatccgtgtccgcaatcttgcacaccatctttatgattcctgccttcgaggacaccatcgcggctcagctggtcgcggaggacgtcacgctcctcgtcattcttttcgttccaccacttttcgaccgtggagaacatgatttgatgcatatcggcagccccatcatttccagactcacgaagagcggggtggtggaaaacaccagaaatgattctgtcaagagttcggtcgacatcgacattctcgtcgtcccagcatgacatgagctgaggaactgcccatttgacaaccgctgacgcaatacgaccagcgggctcattcaggatgtttgagaagtggtcttttgagagcattgagtgagtcgggtttgagcagctgtcgtcgttaaacaccacgtgctgttgctcccggctgctctggatcacctcggatgaaccggtttcaagctcggccttgacctgcttgatgatgggaaggatgtaaggagccagaatagagaagacaaaaatggtgatttgatcctgaatttgctcgatcaggtcgggcaagattggaatcttttcgatggccttgttgatttgtttcagcaggttgtcgtgccactcgaggactgggtagatctgcttctgggcgttttccaggtaaagagtccactcttcaggatcccgaggagtgaccttctcgccgtcatgtttggcttcatctgccttggacttgaagtcatccatcttgctggtctggtcggtatcaccaagcaaaccgtcgggaatcttgctcagcagagtctgcaggaaactctcggaggaatcctcattctccgattgggcgacgacagtctccaaggactcaatttcagactgcattgtcttatcggacaactctcccagcaccgaatggaagaaatccactccaccaaaggtaccagtcacgattggatagacttcctcatcgaccccgtcaacctgcagtttagtgtcgcgtccgacatgagggaagacctcggtctctcctagttcaatcaggctgagctctgtgtagttggagtgcgcagcataatcttctaggcagtgcaatccagtgcccaacagtcgcagagcttcatataagtcgtccttgttcctggattggccatagcgccggcccatctgaatcgagcggccgagaacacggcgaatcagcgcggccgagttgtcgatatcggcatcctcagttgcgatgtagcgtttcaagcctgtgtttcgaattggttagtccaatatcgaccaccgtgtgatcaaattccataccggtccgggaatcgactgcaagttcctgctcttcgtcaacgggaccacgtagtcgcggatcgtagtcacgcgcatcctctccggtagcgtatcccaagggattatcgatatgctccgtaggttggtaacatcccaggcgttcagtcgtaacctcaaactctctggttccgtatcttttataggtcttagcgaaaagtcgacagtctcgatatactttcacaactcacccaaagctcatgaatcccagcacccacagcaggatacggatggcttcggcactaacgtatttgacggtgcccacatcgactgcttggctgtaatcacgcagccaattaccgaagtagacccgctttacatccagcttgccgaatttcttaccaccggcgaccctcgccataagcagagtcagaagggtatcctcaatgtctccatgacgccagttttgaccttcgaggcgggaaagcgaggcgatgtttccagcgccaaatgcatatgcctggccggagaaagcgacgagtatcaagagggtcaaccccaggttctgcaaagacagacccatggttggagaaatggtacaatgtcggggatattttttatgcaaaagcaagggaagaaaaggatgagaagaaaagaagcgagagaaagagaaagaaacaaaaaagagtcaaccccaccatgtacaacacacaatgtcaaacacttggtgggatgaagatcatggtgggcttggctgcagcttggcggctgtacgtatacggagtacatgaaggtacatgcggtacatgtggtatatggagaatacatgaaagattcaagtggagattgtattgccaggtatatcgtgtaaatgaggtattagggagaacaggggcgataaaggaatagattaaaataagatgagcctaggcaaaaccgcactagcgcgacgaactatttcaaactaatcaaacgatcaaaacgaatcaaacgaactagaagaactagaagaactagaagaattagaaggaatcatccaataggaggccgagtgggtaatataggggaagaataggagaagtcaaagccgcatgcggtctcgatcccgtctgtctccggcttcaccgccgtctcctttttctcttcgactgggaatatatctactctcggttttttattacttcattacttcctttttttcctctctctggcttcgaactcttctactcatcggaccctgtctcaaatgccagatcctgtatcttccccgctatagagcgcttatctcaaatcttcacttcccccgctgatgtgctgatgcgctgatgcgcccctcttgatcaatcttgatttatcttacgattactcctcttttctcgcttccccactcatccttggcctggaatcgagctgtcatactctgattcccctttagctcctgtggacaatcatgcatcacgcgattcattactaaaagccgtgacttaagagcgttctgaccatggcacgcgccgacgattcatactcccgcgagtcggccttccctgtcatgaaaaaccgactggcgggtgaatctggatccctccagcgccctgtaaaggcgagaccaggcattgaaaccggacgggctacctcctataggtttccgcctcgagatctcaacaactcccaagatcaattcccattcgaggttgccgacaactcgcactcccctatcagtctcaagaagcgcaactccatggcttcaggcatggctatgcatggtaccacaccgggcgaacaaccgtggaattcggaacagaacatgaatatatcctccgacgccctcgactctcgccctcacaaaagcaaatcaataaaacccaaggtccacatcaagcccattctgcggaaactctcccgagatgatgcgccgtcgacctcgattgatttgtcccgatcgtccactgaacaagaggggctgggcatttacatgaacctcgagcgagagtgcccacgcagcgagcccctcgcaggtgtgaattttaagagaacatcctccggccttcaccatcgatcggccagtggaacatctcagttctcaaatggctcaggctccagtgcgaccaagcccggatcccagtacgtgcatcccatgcgacagacgcctcgagcgtacactccaccattgggccggtcctacgaggactcaaaccgggatagcgaagaactttatgaaagccccgagtcggaaccttcgtctacacaagaatcccgtacttcttcaggcccggcccttccccggctgtcattgcagattcaagaagattctttcactcggctccccggggtttcacagaccaacgtgaccagtcgaccgtcctttgggtactcgcgggaggcggatggaactacatccccgttgtctagaacgtctctcgacttcgttttccgatctcgaacccgtactagcaccgatcctatttcgcgtgcagccacagttcaggctgcccgccaggcatttgaggaaaaagaagccgccaaaaatcgacggcttgaaaaacaacagatcaaagctgaagagagaggcccccggcgtctcttgaagcggcacacgtcggaagataatgagtctcctgtgcagtctaaagaggagatttctgaaaagccccaaagacccgttttgcatgggaccgaagagccatctgcctcatggaaatcccaatccaaaagcgcatgggttctctttatgacctggcttcgaactagagtgttcaaactgcgacggaagattaagaaacttcgttgattctgactccttccgtccaggttttcttttttctttttttcctttgtcttttcctttgttccgcccctttcctttttgttccaagttcatacttcaatgagcgagcgatttgattgttcccctggtgttgatctgcgagtcttttttgcacctttatgggaatatcgctcaatatgagcagatacacggcgtctggattgctgtctttgcaacgtatgcgtttgccatctctaggcaatcgcaggtcgagttgtcctagagatattgacctagcatttccgagggcattttattttatgcatgggaaatgagaaatgtgggatctgcttccccaatggtaccaaaccgaattatgaaatgaaattcataccattagttattcaattgtgctttgtaaatgtaaacgtcagatgttgtcaatgttgtgtgaagggatataattgtagtcacgtgccaaactgcgctgtccgcgtcttccccaaattcccccgaagactacggcgcacagcagcgacaacaaccgcctgataagctccacaccttccagctctatctatttcttttacagacgcacctccacggaggggagcgtctccttcatcatggtgtacgattggtctggcaagcgggaaatctgcttccagatgtacattcaggaaaagaaggcgttagaggagatcatggactacatgcgaacttcttgtcagtttgcgccaaggtaagtgtatatgtccttgctttcatttgtaggatactaattgattttcatcacttctctagcaagcgtgcctttcagactcaatttaaacgatggggctttccgtcgaaacaaaatccagcacacaagaatattgaactcgtcgctcgagtcaaagagctttgggaacggaacacaagccagcgggatatgcttcgcatcttgaatgatgaaggctttgagattaaagagagggaattaatgcgagtacgcgcaaagaatcgatggctgctgcgagtccccaatggaatgaagtcacagtcgaatgtcgaggaagaagaagccgtccaaccggaagatgagggcctactcgccttgcagcaggaggtatacaaggtcgaaagcgtactcgataacccgcatcatctccctacacagccagatgaacgcccaaccaacgagtcccccgctctctcaccagaggtcatcgcaaaacgccaagagcgactggaacgcctgaagaccgaaagtgcagaacgttgggcaaacagaaaacgtcgtcgtcgaactcgaggatgggccgggctgccagctgaccctccggggcctccacgctttccgtcggagacaaccatcgacgagagcaagcagtatctcaacctagacaacaccatgtaccgccagaccagggaccatttccagcgaatctgcgaagaagcaggctttatcaagaaaaccgcagccggtcctgagagatggcaagctgcgaaagacaaattgatccaagaatccccacaccttcaacaggtgtttaatacagatcctaatcaacgcgatgcaaaggcccttgcactcgatgttgtgtgtaccgatgtcaccaaacgaatgcggactctggagagacgcatgacaatcgcggaggcgaagaatgccctagggatcaacccggaggaaagtcgacagattagaaatgcgttctatgacaccttgaaggtggatcatttcacaagcaagttagaggccggcgatgaacactggagagagctcaaagagcaatggattgcaaactcagagctgctccagcaaatcctcgcccctgggccagccgacccagatcacggcaacaaactaaaggctctggaagtactctgtcgcgatgtcatgaagagactccgagacgaccagacgaagcgagatccggcacgtaggagatcatcggcccgtgccgggtctcgaaatcaaaccccgacaacctcctcgatgggcagcatgctaggcaacgacatcagcaatggaattagtactttggcctctcaggcattggccagtgcacccattacggctactgatattggcgatatgcaaattgacccttcactactccaggctgcgaacgacccatctttctcggctaatccacaccacgacgcaggcaatggctttgaatatgtggatcctatgctcagttccgcactattacatacccccgtctggtgtcggattagcttgaaggaccagtcgcaagaaataatccgaaaaccctggctcgaaaagctagccacacgaacagtggaagaactccggcaattgatcggcgccaggtatccatactcaatcatcgcccgaatcgagggcattgacagggatgaggaagggaatgagcttctcttctcaatcgacgatgatcatcaattggatgcatacttgactcatgttcacggaaggaaggcgttgctcgatttcacctttggacagatttgaactctcggccctggtggcaaggcgtagattcggttgagctaaacagcgttattacccccaatgttaggataacaaatgaaatttactgtagggaataagataaataggacattcttccttagatattaagtctccagactcaaaggcgcattactagatccttaacaccaccatgacttgggcttgtgtagtaaaagataaatcatgaagtttttggggggtacctaagtgaccatatacatatacaacattgttcgctgttcacaattccaatgttcaaaaacagaaaaaaatccctatcaaccgctacacccgtgcaccgaataagaaaccgccgtggaccaaaaccatcagctcagttggcgccgagtgtttggaccacgttcctgaagaggaccccaatagcaggcaaggagaatgatggagtctcaccaaagacactagccagtcccttggtttgagcagaaaagtcctccacgtcgtcggattgagcgaggagcctctccggtcctcggtggaagagagttgccaatccattgtcgatttggccggtcacatcacgggactggttgttctgactcttctgggaagccttgtccagacagccaagtcgttgtacagttgccgtggaatcaacgacgatgtaatcaccggaataggcatctgagagcagcgcaaccggggagctctgcagggtttcctggaagaccacctcgaaggatgggacgtcgtagatcttgatttggaatcggaccttgcggcgtttcttgtgtgacgaactagtaacaattgccaatgtcttcgttctggcattcacggcaatgagctgtgagttgccgccgggggaatccacagactctgacgactgaatggtcttgacgacatcgtcgactgtgtcccagacagcgaccgagtgagtagaagcaacgatcaaatggcttcctaggaaactcgtcgagcaggggtttccaaggaaaacacccgtgcgtcggtagtgcacagagcagtttcgcgcatcgatcaggacaacaagaccatcatttgcagccggtgtcgacggcaaacacacggccaatactgagccatcctcggagaaacccatacaagccgcctccagaggggaatcttcggtggaattgagacatccccgcaggtcaacggtaccacgacacttccacgtgttcagaggctggtctgcttggtctttcaccttcagtccgtttcggtatttcgcagttgggcaccagaagcgcagaacagagtcggcacctagggttgcgaactcgtgggcaccaggccgggacaccagaccaagtacagctgagtgatggtttttggagaaatgaggaccgtcgacacgggtgaccagttcccatgtatcagaggaagcgtcccacttccagaacttcaagaagacctccggacggagggtggcggtggatttagcattagaagagcgatctagggcttccacatcccgaggatgaggggcccaggtatcaaccgtagccaaccacttcgcatcatgcactatatctaagtggttgatatcgggtgcgacaatttgagacccttcagggctgacgctcaaagtggtcgcattggttcgcgcaagggcttggcgggaaatattggagttggcacggatatcgtatgtctgaagcacagccgcgtttgcaggctgagagccatgctggttttgagtaagctgatgggaagctgggacggccacaatcaatcgctctggttgctgcgggtgcaatttcgccacaacagatccccttgaggattccagagagccagacatgtctgggcacaactgcaatcctgtgatggtagtaagaggttgcaattctctcgtcgacaggatcatgactgaattgtcggccaatttaaccacatacgagctgccactggcggatacgacaatgttgcagataggggaggaaagatggggaaggaattgcttccggccagtgtccaattgccagagaaccatgacggactcctgaccacccgaaataatgtagtttcctgatgaatgtgagcaatctctctctgataaacatgtgtataagagtggacataccgtctttagaccaacgcacggtgttgacagagccgcggtgccaatgcagctttctaggcgaagacttcttatcgccgagatccttgccgaagaggacattcaagacattctggtacatcagtatagaaccgccgctctctcctactgctagatcgatggattccgagccttgggcctggatgtcaaagcaagtgacattgacaggaagggtcgcctcgcgccaggcgtattggacagtctcaaggttctcgagctccgcgctggttgtagtacccataaagagatgcttaccatcactagcgatgatcactcggccgtcgtgggtgaccttgatgctattgattttctggctggtctcgaggacggtggtgccttggatcttattgtcctccagtttgttgatcaaaatctgcctttttccgtccctttgcgatatgaccgagaaggaagtagcagttgtgcttccttctttccccaccgaggccagactcgttgaaacggctgtgcaggtagtctcccagtgtgcgatgcgctttccggaactccaattccacttgctgatagagcccgaagacgtaaagatatagaggctttcttggtcctcgggacaaaggccgaacccaatgatctgttggccagcctccatttgcaatgtacgtgacaggcgagaggttgaggttgcgaatacttgaacggcggtgtcgagtcccacgaggagatatctgcgatagaaaaaggtcagaatgcgtctcactatctgtcggcagaaacagtcctcacgcttcatcatcggtcaaaattggatctaaattgttgtaacgaccgccaacagggcgcgagaaagaccactgcgcggggcttttttgcttaatctcggcatcttgtatctggacatcgccattggaaccctgtttcacactatcggttggctcgaccgtctccaggctctggttttcgttggctcctgagactctacgccttttgggtcgctcttcatttgaccgggcgagcttctcggaggccgcatcgctgagccgagatcgcttttgctgtcgtgcggactgattggccgccatttttgcagatgaggcaggatcgagaaagagaagaaagaacgttcaaatgttagctagtgcgactcagacaatcatagctctcgcaaattgggacacagttgcgtagagttgagtctggggatattcatggcagatccgtctacttttttttcccaagggaaaaataaggcggggattgctggcagaaaatggaagttctcctgattgggttagatcggccttcaatcttcgcgggaaaaaaagtctggctcaaagcgacattattcacctccaatcgaatcacctcctaagctgaatcgctgaaatgattattcctgtccgttgtttctcctgtggcaaggtgagcagctgttttttgagtgcgtgatgtatgatcatttgctaaactcctgattgtaggttgtcggtgacctctgggagcgttacctgcagctcttggacgacggtgttccagatgggtatggcagcctccagtctatcacacctgtccctggctaattaactcttttacagcgatgctatggaccagcttggctgcagacggtactgctgccggcgaatggtcatgacccacgttgatctgatcgagaaacttctccggtacgtctcttatttcgagattgagtgattgttgctcattttgtacagttacaattccgccgagaaagatcgctccaaggctcaggtataggccaaccaatctctcacacgaactcgaaccgaggctttcctgtcaaaaaatcacccgaataccccattatccctaccgggtcgtgctagcccgaccgctttttcacgttcggctaaaagatattgggagcatattgaagtttgcaaaagaaggaactccagcatcttaagcttaatgatgtggtcgttggtgttggctggtctcaacattcaaatgctgccagttttggatctccctggggcagtgaagtggtttgagatgcgacgggtgacccaggctccaccggagatgggacgaagttacccacaggtgtttcttccggtatttgcatttagggcggcgttgcactctacacatatggcgccaagggaggtatctgcgttttggttattactgtcttcaatgaattttacagctcagcggtttgcaatctgacccatcaaattgcaaaatcaccatttgtagctcaacccaagtatgtgtttaaacgccactgcttggtttgtccttcgaggaacgttgggctgttgtggccgatttctctcgtgcattatggccctctgttggctagaagtgtagtcgttgtcagacttacagagtgaattgattttctggcatactcagatattaggaattgccatgttcctagcagtgtacaacataatattactccggccaaagtatacattgaatgtctaacccgatataaacgggcaaattccccgcttggacgcctccgatgatctcaacaggtcgagacctcattctagatctgcagtatacccaacatggatttatcagtcccgggttgacgggtatgaactgttggtttctacgattttggattgatcttgggatttgagaaccaaaggcgtctagatagtccgaagaacgaaccaatcctgagagctacaacttccaactcataaatctctacccgagggggccaaataggcgccgtgatgaacttgcatctcaacctccatcggccactcacatcgaggggagctgcatcagactataccgcatccaggacaaaagcgctttcatcgatttcagccaatcagagagcgcagatgtattacaataatagctatacaattacttcacagtacactttccccaatgcctttctttctgcagttggttcccaattggcgcatttgcatattgagacattgccaatgtgaaatggggactccacattcattaccatatctgatatcccctcctcccatcctaaccatccaagtatgaatatgtattggagaaacagatatcacgtgtagtatacgctaggtaagcgatgagggaccgggcccagctccctcaagtattgctccccccatcttttttttgctctttcactcgagctttgttttcttctattcccgtatacattcggccatggccgttaggtcgccgctatctgtcttaccataccgcgtcaacgccgcaagtccggcttactgttccccgcgctcggtttcaatgtaagaccagtactggtttctctaagaccatcgctgatgcgtaaacaggtctcttgacggggtcctcgatgggaatgagaatccccgcctctccgcctctgagccgataagcagcttatcaggggcctcggccaatgaagaggatggcgatgattgtgatgattgcgacgattcaaatggagaagataacgctactgaacttatacgtggatccgggggcccttctcaatcagggcttacagtatgtgcgatttgcgggctatacacatttcagttggattcacaccatatagattcaaaccgaatacccaaatcattcgggaaacagcacaacatcggacgacgatgaacctccgcagtcggtgatacatgctccgccaggatttgctgattttgtacgaataccatcagaactgttgccgcgttggctaacggtgaatctatctagacgtcaatacagcctactcccaaggacacagaggagtcacagtcgccatcagtcggtttgaatgagcaaactgatgtaataaatgtgcctacaaggccgagaaaggtattttcatgatagccctcgcccggttatatatggcgctgatgagttctatcaatacagttcggcaatagtccaatatcgccgcctccattgacaacatccctcagtctcgacaacgattgtaccgagcgagcgacgccacgtgcgcaaacaagacatgagtttgaggaattcgagagacgtagtactcgttcgagtagcttacaaggtatgccgatttttttcaagtcatactttcatccatgatagcccttactgaccctttttcaagatatccccgaaggtataaccgtgaacgaaacgcattcaagctctagcatacaagactaattttaatccaggactaaccagcaaagaggccgaaatcaatgccctaagagctgctctcgacgaatgctggacactgtgcaatacgctggccaatcttagttatatccatcgaaaacgtctcctcaaaccccaaaattatgatatgcaagaggatgcatggcggtcatgttggagactttgccagaagctttatgacacacgcgacgacgactacgcgtcacaaatccttccgactcttgatctctgtcgagatttctgccaggcgctatttgaggcccgtactcgcgacagcgacttatctgactcggtcttgcgagtgagttttgaattgaacaatcatctttacaacactcacgatcggaaccttcccgatgccttccgtgaaagaactttggatttctacattaccttgtgccaccgtctcatgaagcagcgcactcgcatcacggagacagactctctgctgggtgcatgttggacattagccgagatgctgttcagtattcgccagagcaagagagaagggaagccgctggatgaggacttgctagggtctgcagttcaagcctgctgggagctttgcgatctgttccgcgagggttggaccctccataatttgcgcaactcggatcggggaacaccccggccgagccaaaccacgttctcgcaggcattccatcaaacgtcgcaacagtcagagctggatttcggtgatgacccaatgagccaacttggcaaccccgagactccaaccaccatattcgaggacactgcaacggcctcgcccgacgacactccgattccgaatatactcgtattgggctatgggaatgggcataataacgctcatactaagtggtcatccaatgcatccagtatttcggagcagtcccgatcatccgatcacacagcatcctcggccaacacagtgaccactgtctcggaggatcccaacctcacgcgattaaagatcctgatcaccaaagctgccatcattagtggatatcaacggggcgggagccagaatctctcatcttttgtgaaatcactaccctcggatgcgtttggctccgcggcctggcagacatcattattgaagaattatagaaaggtcgtggcatttgacccggcgttcagaagtgttggtctgcaagcccgggtgagtgccattgatgtcgcgcatgcatgccaggcaatgctgcaaagtggccagtactcctggctgcgtgacctctaccggctcgtcttcgggttccatattgaagaggcgatgggccgtaaaggtgtgattatccaaacatagcactcagttccatcatatgtcgctatctagtactttttctgatgagttggcatattcaacgcggtcgacattcgaagtggggagtggggactaggtgactcttattttgtacacaacaccagtgatcttgtattcctcgtggaatattcttccctgagtttcgttggagttggggctgtgttaaggtccatttgtcaatctctttttcagcctcttttacccaagataaggcatagcaggggtatatatcaataatacatcaatgtccgaattttggcccattaaggaatcactgcttgaaacaaggaaagaaaaaccagggcaatataattctgttggaccatatagatatggatatagatatacgtagtagaactatattccgtaccaacttccctagtcaccaccaaggaaaaaaacgaagaatttcattctcagccaaaaagaaattggcaatcttctttggattagcctcagttaggctgactcttagcatatgcaggtgagatggctgatttgtgaattttgcccactttcctctggtctacaactgtcccaggcttgacctctatctttgcttttttttcctttttccttttctgtttgcccctttttcctaaattatcccagtctcaagtttccaggcatcgtgaacggacagacatagtccgagacgtatttatgccgtctcgcgcggagagccatgtttgtataaatatctttcgctcctcaccagggaatgttctccttcactttattcttctatgcattgacctatctcttcccagataggcactcagtttactatcattgaaacatccttatatccttattgggtcaccttgaaccatcatggttgttcccaccttcgccggcatgtctggcaggctcttatcgcgtgcagttaccacaactgcgacaatgggtttcctactattcggatatgatcgtatgttttgtcatcctgaactaagcactccactaataatagatctgctacagagggtgttatgagcagtatcattgatgcttcggacttcactgatatcctgaccgagttgagaggtaattcgactatgcagggtaccgtcactgctctctatgaaattggtaagctccgtcgaggatttatgtccgccttagtttccagtttgatactaaagatttatctcagggtgtctttttggtgccatcttcatgctcgtctggggcgactggctcggtcgtcgaaaaggtatcattagcggcgctatcgtcatgatccttggtgttattgtgcagatcacttcttatgctggcaagcagcctctcgcacaatttaccattgggcgtatactcactggtgtgggtaacggaatgaacacttctaccattcccacctaccaggccggtatgtattcaatgaatttgcatggaatcttgttagcatagagaaagtcgactaactctgaatttagaatgctctcgaacctcaaatcgtggtcttcttatctgtatcgagggtggtaccattgcctttggtacactgattgcttattggattgactttggtgcatcatatggtccccccgatgtgatttggcgttttcctattgccttccagtgtgtgtttggattatttattattgttggtatgatccttctacctgagtcaccgcgctggcttttcacacgggaacgctatgaggaaggtgagaaggttattgctgcacttctaggcgccgaaccagactcccacgaggtggccctacaaaagaacatcatcatggattctatccgcgcctctggtcaaatggggaagaccaccccaatgtctgccgtctttaccggtggcaagactcagcacctccgtcgtatgctccttggagtttcgtcccagctcatgcagcagattggtggctgcaatgctgttatctactatttgcctatcctctttagagactcgatcaagctggaggggaagcttccatctattgtcggtggtgtcaacatgattgtctactccatctttgcgactgcttcttggttcttgattgaacgagtcgggcgtcgcaagctttttctctacggtaccattggccagatggtctcaatgctcatcaccttcgtttgcttggttcccgacaagtccggtccagctaagggtgccgctttcggtctttttatatacattgctagctttggtgctacttggttgccattgccctggtgtgttttgagtcccaaactagaaatcaatgtgaatactaatgcgtttctaggctgtatccagccgagatcagcccgatcaagactcgtgccaaagccaacgcgctttcgacctgttccaactggcttttcaactttttgattgttatggtaactccaatcatgattgaaaagatcaagtggggaacatatctcttctttgcagcgctgaacgcttgtttcttgcccatcatctactttttctatcccgagaccgctcgccgttctctggaggagattgacctgatcttcgccaagggattttcggaaaatatcagttacgtgcgcgctgcaaatgagctaccttacctttctgacgaggatattgagcgtgtcgctatccagtatggatttggtgccgatgagatgaagcctggtggtgtttcgcaacctgaggctacctaattgttgggtgtggtagacggccctgcttttggcgaatctcgtgcggtactagatgtagaatgctctgatattttgtgttagatgcctatacaagacatttcaataaatgactagtcaagttgcagacagctttcggactcttaggaccagcaggaacatgtgattatgaaggtattgaaaaacatcagcaccaccactctataggtagtagatcctacaccaattgatatgatattgggattgtaaagaacatgaataataccgtctaatacgtatgtagagtagagacgaacaggcatctaatttatcccccccccctcctcccatttcatcatatgctagtatctcaatagaataacgtaagtgcaccgggggtgtacacacctgtggaccctagagcaccgctagatccttgtgaagaagtaaagatatgcggttttcttcatcgcttcgatatcttcaaacttgacaactttttcatcattgaacatcacccatgacaggccactttgacctggcaattgtttgcgaatcatggcaacataatgcctagcatgtgttagtctaacccaacgaagtgagaacgaagacatagagccactcaccctgcatggacagatgtgcctttgtggcatacaattgaccttaattcatatcgagcaggtaggctagtaagcccaaccgagccaccatgagactgtgcgttgtggtcgtcgatactcggtgtttccatttccaccacatcatctgagtgagtgaaaacccaatccagtgccctgttaacatcaccgtcggtcgcggccaaggctcgctgggcacgaggcgcctcaatacccatgtcccctaattgagcgatttttgccgcgtcttgctcattagaactggaggtgccgactggttcaagggccatcggttcatcgatgtctggatcttccatgtgggcaaatagccaattcatggcagtttccggatcagagttgccagtggcatgaagagctttctcacacctcacagcagggaaacccatgcctatgagttgatcgagggctcctggattcgggacaaatgcggtagattcttcaatatcgggaagttgctcctcacccgcatcatgctcaccagcaaggtaagagctgaaatccagtggtttgtcgtcgaccagcacagggatatccaactttgtcggaacccagttgacgagctcaaaccgacgagcattgaccactaattcctgaggcaatgttttgaaagacgactgcttcgaaaagccatcttggctgccacaagcaggacaggtaagctcaacgacctccgccgaagtaaagatgtctagacactctgacaaatccacagactcatattcctttcctgttccgtcagaactggtaataggacgtgcggggacagcaaccgaaacgttatcttgctcatccactttatagcggacttttttgcaatgcaagcactgaagacgctgctcaacctggaagcgaaagtcctggaccgggttaatctgcggactggtgtgtttcgataggctgacagacttgaataaatgaaggaggaattcaaatgcatcttgctgtctcatagttgagaactcctcatgaccttggccaataagatacttgaacattgctggtgctaaacccttctgatgagcgacttctggtatatccgcggacaacataacgcgagaatcaggccgagagtaccggcctgagagtagaccgtcggcaagttttcgcaattgtgtctcaaggtcctgtgctggtgcttggcagagtggtggttcttctgacagctgatagtatcgctcacgaaatccggccacagaaaatatgcattgcatgatactggagagatagcagctgttgccaagattcgccagacctgtaaatgcaggcccaaagacagggaccagctcccggccatcctcggtcgtcatggaaaattcccattttagattatgctcgacctgcatctccatcagactcttctctgtcttctcacgcccagccaaatagattccccagtgcgcaaggtgggtcgctagttctgggtctactctttcttcgttgcacttataacagtagacatcagcagagccttctgctgtgatggagccaagcttgacagccacagcatgtgatgttgagtctgcatgagtaagcccatgggagtttcccttgcttccaccgaattgacttcgcccacaacccttattcccacattccagacacagccagaggttctctcccaggtcacactctgaacaatggtttaaatctgcaatttcattagcccagaccccagttgagtatttcagggaatcaataccagtcgatgcggcatgcgtgttgtcctgttgaaccagacacaatgtatgctcgcaaggcacaaactcttgctcccatgccttgacttcttcctttcttgagaaagtcattgctgtcataacaccttcaatgacagcagggagcttgccactggctttgtccacattgtcttgggggcatgaatagcacaccactgacgtagcaatgtcatatctatcctcttccgtttcggctgcgatggaaagctttgaaatcttcggcgggggctcgtcgcgctataaatcagaggtgtgagaatcattggccacaagtccaagaaatgtttagaggctgtacctgcactttcttaggagtccttcgtatgttcaaagccagtggatggccaaatctcttgtaatgaagcagggcatggtctctgtttccagcacatccaccattgaagcaattcagacagacatttagaccagcatcatcgtccttgcaaggttagtcagacgacatgtggagtggtaggaaccgggtggcatacaatagaatcaaagcactgagtacaatcttctcgataaacagcctggtaaggtcctggcggattcagatctatggagtgttgtccattagctccatttgttcttcgattatcaaggtgatgtcacaaacccgcagcaccggtatggacacaagaggccatatccagagtggaaatctcagtaattcacgacgtgtcaataaagacttcttagcttttaacgaggacttcagaaggtgcgatagtatcccattgaaagtaaagatgggaaaaagacggaatattaaatagtgcagatcaagctaaagctacgatgcgtggggttgctccttcctcaccgcctgcacgtgctcttatcaatgttgtcctgaggcatgaagtcatgtggtgggggtgtgccacttaacgcgttattttcttaacacgcgttccaaccttgtcctccaacctggacttgctctctcaagttcggtcttccttgcttcgtttcttttttatttccctgattcatcccttcacgtcatcgtttttagtctttcctcaagtcttctttctcgactctctcaattattgaaatttgaagtcatcattatcatggcttccgaggcagcatcccaaatcactattggggctctaaggtttgtattcattggtctgtacggcagtatataagctaatcgcgtgtttaacagtgccatatttgatgaaaccaaaccccaagtaccagagccaattgttcaatgcgttcagatcaagaccttgccatctccgccgaaccaaccagaacgttaccgggctgttttcagtgatattgcgaactatgtccaaacgatgattgctactcgtacgtgctttcctctcattactcttagtagctcatcggacttactaaccgctagaagaagccactggggtggtgaaggatgggtctcttcggaagggctgtttcgtgcgactcacgtcatttcagtcaaatgttgtcaaaggaaagaagtatgtgatgcaattctatccattttgactgtgctaataatcacagtatcctcgtcatcttgggccttgaagttctaacggaactgggcgaggctgaaaaaatcggtgatcccaaaccacttgcagtcaaatccgaggaagaggaagtgggtcaaccgacaacaatatccagcaatgggttttacggctccaagatggagggtgcacaggctcagccgaatagccgagcccagccaatctctgcccctatgtctacttcctccgtccatgccacaatctacccgattgaagccgtctccccgtattccaacaaatggacgatcaaagcgcgatgcacaaacaagtccgccatcaaaacatggcacaacaagaatggtgagggtagactgttcagtgtgaatttactggacgacagtggtgaaattcgtgcaactggtttcaaagaacagtgtgacatgctctatgaactcttccaggagggcagcgtttattatatttcgactccatgtaaggtccaaattgccaagaaacagttctcaaatctcaacaacgattatgaacttgtatttgagagagataccattgttgagaaggtaacatctctttcttcataaaccaaatgcgtcgctgacattctatgataggccgaggagcaaaatgatatccctcagatccgatacaacttcaccaccgttgctgatttgcagactgtcgaaaaagacacgaccactgatgttattggcgttctgacggagattggggaggcatcccagattgtatcgaaaagcaccggcaaaccttacgagaagcgtgagcttacactggtcgataacacaggattctctgtccgcttgacaatttggggtgcaactgcacaaaatttcagtgtgacacccgagtctgttgttgccttcaagggagttaaggtttctgactatggcggaagaagtctgagtcttctgagttccggctcgatgactgttgaccctgacatcggggaggctcaccgactcagaggttggtatgatgcccaaggcaggtcggaaacctttacatcccatgtgtcaaatgcgaccaactccatgggcaaaagggatccctttaaaaccattgcgcaagttcgcgaggagcagcttggcatgtctgaaacttttgattacttctctctgaaagcaactgtgatcttcatcaagcaggataacgtctggtgctaccctgcctgcctttctgacaactgcaacaagaaggtaacggaacttgatccaggacagtggcggtgcgaaaaatgtgacaaaacctaccccaagccagagtaccgctacgtcctgcctattagtgtcggtgaccatactggccagctttggctcagctgttttgacgacactggaaggaaaattatgggcacatctgccgatgacctaatgcaacttcgcgaagacgattccaatgctttcggtgaagtcttccaaacagcgaattgccagacctggaacttcaggtgccgagccaagacagataactttggcgaccagcagcggtaagaatgatggaacgacaataattcaaataatgcgaacatcatgctaattgtgtcatccagggtgcgatatcaggtctcatcctgccagccgatcaattactcggaagaagcctctcgccttgccgatatcattgactcgtacagcattgagtaagtacaggcacagtggggaaatattattgtcctgctttgtactagctttactatttccatatacgctcggagctttttcatcaatgttcatgtgtacttttactagtatgctgctcaagctacgccatgatcatctcatttatggcttctcattttgacatttgttcgttctcccttatttagtattttaaaaacacctaaatagtaatttttcactaccatccccttccttatgagcaatccgcaatgtgcgctatcactccgtctggacaggactccaaaggttctacatgtaccgtactatatgtgaggcggtaagccaacaaaggcggaaatcaatggcattacacgattgctttttcttttttttttttttctttcgggttttctgctggaacaattcaggcagggaattcagtctcgtgctctttatcttttggttcattctaaaatactcatcatgggtaagcgaagccatcttgagccagctgagcagcgaccgaagaaaaagtccaagtctgagaagtctgagaagtccgagaagccctcaaaagcttctaaagataagcaggaaaatggcgatgagaagacagcagcttattctgatgcgtctgctctatccgatatccctcagtcagacattgacgcttttttgaccgagaacgtgattaaagtctctgatccctcctcacccgacgccacacaattccgcccaatcctttcgtttgatcacctacctaaatgtgacgctggtctgtacactcagttgaagtctttccccgcgccaacaccgattcaatccaccacctggccgcttctttttgccggccgtgatgtggtcggtatcgcagagactggaagtggcaagacacttggctttggcttgccgtgtctgaagaaattgattgactccaagtcaagcaagccttgtcaacccaaggcagtggttatctcgccaacacgagagcttgcaatgcagatttatgaccagcttgttaaattcggcggcactgagaagactcgggtgacatgcatttacggaggtgtgggtaaagatgaacagcgtcgggcccttcaaaaggccgccattgtggtcgccacccctggccgtcttaaggatctcctgaatgatggttcgattgatcttggaaaggtcacctatctcgtcttggatgaggcagatcgcatgcttgacaaaggatttgagcaggatatcaaggacatcgtcaagccgatgcccgtctccaagagacagactgttatgtttacggcaacatggcctcggtccgttcgagatctcgcggcaacctttatgaagaacccagtaactgtcaccattggcggagatccatctgcggatccccgagccaaccttaggatcaagcaagtcgtcgaggttgttgatggccgagataaggagagccgactcatgcagctgctcactaaatcccagcgtggtcatcagtcgcccgagaaagtcctggttttctgcctctacaagaaggaggctatgcgcattgagaatctcatcagaaacaagggattctctgtcgccggtattcacggtgatttgaaccaatcagatagattccgaaatcttgatgctttcaagaacggcaaagctaccattcttgtcgcaaccgatgtggcggcgcgtggccttgatatcccgaacgtgaagctagtgattaatgtcactttccctcttaccgttgaggactacgtgcaccggattggaagaactggacgtgctggggctgacggccttgccatcacaatgttcactgaaactgacaagggactgtccggcgggtatgttactcatatttctaatatccttgactggccaatgctaatgatgaatagattgatcaatgttctcaaggcagctaagcaagatgtgccagaagctctgttgaagtttggcacaacagtcaagaagaagcagcacgatgtgtacggcgccttttacaaggacgttgatatggacaagacagcgacaaagatcacatttgacgattaattgggctcattccgacttggtatttttgctggaggatttggaggacaaaatgtgccgaagccttgtcagttgacccatcaagtattccctttctatataggctctattatttttgtcggttaggcgttaagaacaaatcaacatggaatccgatcagatcagtactcacattacgagggcatagccaccacttaaggcgcatgctttgataattcccaattccaggccaaatccgcggcccaagaacaagctcgccagagcacacagaatgaagctagcaggtcgaatggcgacctcactcgtgtacaagctgcatccatttcgatggaagtaagatttgatgaaactgtaactccaaaaagttcgaaccgccatgttcacaatgttggccaggaccaatccatatgcacccaagctccctatctctaggaacatataggccgccaaggcataacaggcggaaaagacacccatccacgccgtttgcttccgtagctgttgcgaatttgccgcggatgatacgaacgcttcggtgatcccattaaatgccaaaaatggaatgtagtagcaatagacggagagcaggtctccgattttaggggaagcccattgacggcctcccaagatatgcaacaattgaggaaccatcagtgggcccaacgggaatatcaaggctgacaacaactggtacgcgcgtagaatatctacaagatgatctctggtagtgcggatatggatattgttcaacttcccatcctcatcggggctgagtagggcagagaataagttccggctgctctcctccagcggctggaagattatccgtgcaatgagaccgccatagttcgacgcaagagaatatatgccctgatcttccagtcctgaaagggctgcgagcgtcatagtgtcgccctgcgtgagcaaatgcttcactagagattggaaaaagacattcgcagcaattgacgttagctgtcgtgaaaatagtcccagaaagtagttggaggggtccctatatcaattgttaccatgtcattcttcgtggtatagcttgcactagatgaggccagtcttacctggttcgtatacgtgtcaataagaaagagaaccgagttccgttggtttctctgagcagggccagcgagtagccacaaatgagggccagcgagtagctgaggtgaccaagagcaaatggtagcacgccgaggtcaaagttgacttgagaagcatatatgaaggcaaaagatgtcaccgcacttctcagaaatgccgctggcatttcaacaacagcgcgtttttcataaagcatatgttgctgcaccactgagaaaaagggctcggtgctgagttccatgagagatgcagcgccgatcaagatcacactggggtagaagaaggcgatctttgatgcttcctctgacacgaagcgctggtaaagcatagtgaacataagactgcaaggaatcccaagggcgaggctcaagtaggacacgtttaccaccgcttgagatgccacagactgcgaatccgttgctacagcatctgcatcagaggaaagttttttgttgtcaggcgaagatggaacaggctgcctttggatagccatccgaatactttccctcgagaaatacaggatagaaacctggaagagctccagttgtgctgctattcctagcactaccggtgaaagggtgcgcaaaatcaattggttcgaggcaaaggtaaatatcctggacgctaattgaattaagatcaaaaagcttgtgcccgtggccgacgacgccagaatcttgcccatacgggcatcttcgggttttgccatgcccgtgattgaacctagttatgacgattcgtgcaataaggtgttctcacgtcaaataaatcaacaagaagactttaagccgacctcggggggtgtaggggtaaaggaaagagaggatgtggacaggtggggctctaatccagggcttgacgttttggcttaggcttttgaggaatggaagatatttgctagatgcaaatcaagaacttttttaagctgacgaaattttatatgaaaggaatacggagtaccatatagttaatctattgaatgccacttggaggtcacttgcttacgtgtagccctcaagttcccagctaggcatagttaagtatggctacaggctaattgtgaaactccttcttaaagaaccctctgtggcgtcttcggtacgtaagatttggtatgcaaaatttccatggcaaaaggaaagaggcactatgggtcaagatccgcaaagccctgtgtctcctccaagtggtcccccagggctgatccatgtcaacttccgtttgtcatcatatacaggaaacaagacttggaaagacctggtcactaggatatcaatgatcgtttgtagatcaatacgtctccaggtgttgccttgatcaagtaggctcttggacgctttagaacggaggcagatagaatgggtagccaccattcttggttttgaagacactaagaaggaagctgtatgttgtgaaaagaacagttgcccaaatcaagacagccagctgttgacccttgggatcttccatccggggaaccttcagtgcgagtgcgatcgtagcaaaggagagaacagcgtctgcgagcaaaatgttaacctaggaattcgacatggaaaggaggcccagtatcaatgagtctcacgattatcacttacagatggcagccacaatctgagtttccatcccaaactggttttggaacccaccggcaaagtagctaatgccaccatggccatcaccagcaacatatgggacctttcggatgtggttgaacatttgaccacttgtgaacagaagaatagcgataaggctgattgcagcccaaaggtttcggttctggataattgggagtatgtagggagaaagaactgcaatcgcagtcacaactgccatcagaattgtgatcgctgatacaatccgcatatagttgatgggtcgaactagctgaggcttggggccttcaggcaaatgacgtccaatccaagagtagacctggtcggctgatatcgggctattttggattgacatgttagtgagacaggagatgggcaagacccttggtagaaaaacataccctgtgaaatcaaaccgaaggggatttccttcaaccttggcgaagggaccgacggtaggagggaagacaaggagtacgggtgcagtttgaagcatgagctgcttaggttagtcgcatgccatacagctcagtctgagtaaaaatgccttaccttttggaaaatggctttgccattatcaaaatcaagtgttccaaagaccaccttgaggtcatcaggcttggtgcccttggtccagcttcgggcgatcaggtcccattcagattcgaagtcgcggcataggaggcagccaaagcgaggatccgtggcagtcaggataatcacagcatagtaatctcgaggtgtcgaggtgaggtcttcatatgatgcactgtccagttcaacaagccctgaacgagacagggattgatattttgtaaacttgtccggtgttgagctcgcagacaggacaccagacacgaccgaggaaaggagaaaaagggccgaccagagcttcattttagcatgacagtgtgctagacagcttgggaagggttatttagaaagtgcaattgattgaaaaaccatcaatcggttgcaattgaagttgtttgaacacgttgagtgataaagtccaggtgtccactatcaacgtaatcgcccggcatatcggcttacttaatatattcggggtcggcgtcggcgccaaaacacgggcgcgtcttcctttgcgacaattttatatcgtactttgacaagcattgaacataacaccacatatattacccttatatttcttttgctctggcctgtatcattttatttctaggcgttttcattctattttcttatatcgaagggctcctgtcctggacactgtcgtcatggcaatgacagaagaagcatcggcctcagatgtatgtggcttccctggattgatcctggtatagtcaaaaatgctgactctatcatgcagtttgaaatgtccataaggactatacttctagagaaggagtatgagaagaccctttcagtttccgctcgtcttctagatgaggagagggatcgtgtacgacgcatggagcttttgctctcgaaatttgagaatgaggctcttcggtcgcagttgaaggaagcaaatgggcatcttttgggattcacaagtgctgattcagaggcatgtgctcaacttcaggaggcttgccaagaaattgatcacctggagcttcgagcacaggcatcctcgattgagattaaccgactcaaggtaagtcttaacccagtctagaggccggaaacataatccgttatgttgacagcaataggaagaactatcggtccagaaaaataattcgaccagttataaaactgtccttgcagagaaacttcgtctctccagagaactttcaactttgcagtcagagcttgagcggttcagagcgcaaaatgcatcataccaagtcaccatttccgaaaaacatgagatggaacggcaaatgaactctctggagcttcaacttgataatgaaaaacatgcccatgaacgtgctcagctcaaggcgtcacagcagatgacagagatcacccagctttctgctcgagttggagagttacgggctgagctagcgggggaattacgagcaaaacagcagcaggaacaggacaaccaccaccagaacttggcatgggctaatgagcgggcgacgtttgaaggaaagattgattcgctcaaacaacaattgcggtccaccaaggacaagcttcaggaagcccaggttgaaattcagcagcgacgcaacgtaaaatcacacgcaggaaataactctgaatccagctctcgaaaaatcccccttcagcgccctggcccgagtgccggcgtgacgatcgtaacccctggtgctgttcgtgtgcaagagcaattgaaaaagcattcggctgtgcctggggacaagtcggcgttttccatcactccattcttgaaccgcacaggggcaccttcggattccccaatgagctcagttggagacgaagacgagattcttggaaacgacgacactcctcgtggaccacttggcaagcagggtacttttggcgaacagaagcgaattggttctgccctccggcgccagctatctccaacagaagaccgcattccaatcacaaaatccaccaaaccaagggcacgcgacggcgcaatgcctgtatcagcaccggataaagaggtcaaaaaaccaagccatcgcttagatcgcaggttgccacccaacgaaatcgatgaattacatgatcagtttgagcatgaacaagccaagccgaagaaacgcaaacttggtggtcagcgggatcggagcttgtttgaggaggaggatgaagaagagcctgagctcagcaagaaatttggacgaaaacttgcaacagggaatggtcgggctttaacgatggggagtaaaacacaaagtaccactggtctaccacgggcgcttgggctcggggcagcacccatagggttttctcccctgaagaaagaccgcagacgattttaatcagaagatccggcaattcattcttattggcacaggcttggtgtatttaatatgtacatgacatgtactccgtagacacgtacctagagaatgcccatgcttctaagattatgccgataagagccgacttgagtgttttgccggcagaaagtaaaaaaggtttcccaagctcccgattatctcccctgatattattcaattcgcattatgtttgctttacattcaactcgattttggcggaacgcctgccatcagcaggaaattggtcaagcaattggccaagcaagacatgcatcatccaaacgctggcaagcccggcagcaaaaggatcagttcaccagagaggcagctgtccaagggctgaaaagccgtgctgctttcaaattgctgcaggtgattcagaatcgacattactctatctctctggattagtctgacacactgttacctgcggttagattgatgagaaatatcgaatcttcaagggtgggcagacagttgttgacttggtatgctagtcgttcaacctaaactcggatcattgtttaattccgtcgctttagggttatgctccgggatcgtggtcacaggtgtgtcggctattccttatttgtctattgctgtcaaatgggccgtgattaactgccagaaaaggttgctgcaagccgcacccaaccgcatggccgagtcctcggtgtcgatatcatcccagcccaaccaccgaaaggagtatctacgattcaaggcaacttcctctcacccgaaattcaaacatatatccgagactttctccgcagtccagacagaggcaggccgcgccaacccagcttcctggacgattccagtatcagcccattggagccgaatgcagatacggaacgcactaccgaggccgagaagacggataagatgggcgagaaaatacttgaaagaacggtagatgtggttcttagcgatatgtccgcgccctggcatcagacctccggtttctggaaacgaagtctaagtgctccttataataggatgatgaacaccagcggcgtcagtttcagagatcatgctggaagtatggtatgtatgcctattactattgagtcgatatatgtgaaacccttctgactttacgcaggatctctgccacgcggctttgcgcttcagttcggatgttttgaaggcaggaggtcatttcgtctgcaaattctaccaaggcgccgaagacaaagaactggagcagcagctgaaggaattattcaaaaaagttcaccgccttaaacccgaatcatctcgcagtgtatgattgaccttatccaatttctacacccccaccgactaaagcaattgtcaggaatccaaggaggcctttttcgttggcctggagcgaaaagcgtgagactaaagctttttcggacttacgtgttgacagatcacagcatagccgaagtgccgaatcatgcagtctgtctaaaggatctcgatctcctcgttgtcagatgcctcgtcccagtcaatatcggctagtgctgcttccgccttctcatgaaccttcatattcgtcagtttgggatcaagtcgttttgtagtcatcgactgacctctcttagtccactcaattcttcgacatagccatgttcgttcaaggcttttcgcacaaagtcccaaccgtgctcgcggtatgcactgacaattttatctgagcatgcactgcagctcgaataacttttgccggtgacagacaagttctcgaaattagagagaaaccctcgtatttgatggggcacacttcctaaggggtgatcatcacgctcagtatttcgggcaatgggggctggtgcggcagcgcctcgggggtgctgaagtattgacacgaaaagctccaccagaagtgcagaggctataggagccactccagggcgggtcactgtacactgctggtcgagtgtttgatctttgatagactattccgcagtcagttctgtataaagcaggtcccttctttggataatcttacattagctggtactaccacatcgttgcagaaatagcacccaagctcagctggattttcatcctccatgataccatggcgcatcaccacaaaggaatcaaatcctagagctgcgttcatcacaattttcccagccgcctttcccatcactgtgggcagccatcgcgattctcgggtatccatgagaaggaagatagcatcatgttcatcaatcagtgtcttgagacgatcaaaatctgccctggtcgccgcttcgtccacaataggatggcctgccatgggcaccgagaacacataacctttagtatctactcccgggtaaatttgggttagggcttcggatgctcgaagtgctttttggacaccaccgttcaagcagtcttcgaaattgaatagtggctgccgaacagggttagaaaatgaaaccgtcccattgtcgacgaaagtgatcttcttcacgccccagccctatgtagtggatgattagaacaaattttcggcagggaagttgacgtccacataccagcagatttcgggagacgtagctgcctaatgtgccagcccctagcaatagacatttcgtgttcttgattttttcaagatcgagcgtcgggctgatccgccatttgataagtttgaggttgagatcaaccgactggtctgccaatcttcagtaataaaattagcatgcttgatcaagtcttcattcagtttggttatctccaaattaatgccatacctcttaggatccatgtactctgtaaggttgacaattctcccggctaatttcccagtcgagttgcgttcccaaccggtcacctttggcagtggtaacgacccttgactttgcagtgatctcggtgtctcagtctcttgttttgaacttgactccagctgaattactgtactgcgcccttgatcacgcctcgcgtgcacgtcgcgatagcgtatcaattgtaccctttcgatcccccatcgctgcttgatcagaacaagcaggtttcgtaacatccatcctggggcctgttcataatttgatgggtctgcgaaacagaaatagcggtcttcagtagcgacatttttgaaaaacccattttcatattcggaaagtgacgctatctgccagtttatatttgaagtgtcgccttgttgggcattcttcgtttcggaatcacctgaggatgcgttatcggaattctctctgacttttcgagccaaaaaaaaccctcgttgtcgaggatccaccatatatgaccatgtttccaccgcctccaccaaggcagtgctttcatgtggagataagtgtattcccttcaagttgtcaagactattatcctggtgtggctgggatacttggtctgttggttgcacggggacccattgaggatctgaatggattgctgggaaagcaaaccagtagtggaacttgtattttttgaggtctgcaaaagatacaatcacgaaactgcagagtaaggagggacaagaaagaatggttccatcatgaatggcatcccatatctggagttgattagtatctctctctaaggtatctggctaatgttgattcctaccatttgtccagcttgatagagcagtttggatctgtccatgtttcgatattcctcaacagtattgacatttttgatcatgccctctgctctgtaatagccagccgggaccctaggtcgctgttagaagggctttcagggatattttcttttatcttactcgctgctggttagggcgttcccatggatttgaatacgacacgacgcagcttcgggatcagacggacggatctcatatagtcccagaacaggccgggcggaatcatctagtttgtcatggttgatcttatgggaagccagtgaagtatagaagggtaattcgatgtcggaggcaaacggtgcgtactgcatcttggaggaacagggggagagaacgagaagaatagcttatcaactccagagtgatatagatttggaaggttggatgtagcagttagcaagggtggggggagggaggtgtaaaggtgtgtagtgaggtgaaagggtctgatgtcacgaggagcccgcggcgggggtgaaggtttatctatccacatttaccttcacacttgcttcatgtgaaaatgatcactacatatgtacccaaagccaagagctttatcccgaaaatataaataaaactaaggaggagtcctcaagttttagaggagcgaaattaaccgagacacaccgttaactcatagcgcgacatttaacaccacctcatatcaccacattctgaatgatatgagaggatgcatctcatttcgttattttttatcgtctatagagacctggccaccgtaagatgtgtcgccaactggatctatcaaaggggtccgtacttgcgaccccaaataataccttagttaatacaacgcactgatgagcaaaccaaatccccactacaaacctccaacgacgcggatgccattcccagctagggctccatctaacagctccgacgttcgcgccgtacataaagggatctcaggaagggacgacgccttcctggcaatggatcatcaattttaacgtcgcttaagcttcgcaatataaaaagatcggattttctaatatttcggattttactttttctttgttaatgttcaatctggtatgaaaccatatacgcatcttgatagtaagatagacaccagcaataagcaaataaagtagggttctgatttcgtgcagttactggtatactcaacgtgagtagccaccggcccaagccctatgtcccagctcagtggaatgcacgaggatgatatacatacatatctgcgccggtgagttgaactgcctaaaaagggacatccatggataggaggcttgattatatagtttctggtggtggatggctggttaaagtcagatatcgtagttgaatggcaaggagaagtacattaggcataggaaaccacctgtgagagaacacagctcattatcactaggccacaattaaaccataggccttttatatgtaatcatagaaagaggtgcgctgtatttatctgttctgtttcttttggcacatgggaataaggatctaaatatccgtgtgtaaaaagatcaaaagcagatagtgaaaatgcatcaataagaagatagactaagacatcatgaacgatgcaaccataggctaaccttacagacgccaagagcaatacttgtctatacagctacccaacactggagtatatgggcaacatcccgctatcaggccgataaggtcgcgtcgcgctttgctctgccccacttctttcttcttttcttctcttcttttagacagtacaatcattaaacaccctgaaaatgctcatcggcttatgtggaggtcagcagataattcttgcaaaccaaacccccacccgacacgggacgagctaacgaggatatacgtcaaaaggcatttgcgctggcaaacatgcgattgctgactacctgattcagcaagggtttcagcttcttgaactcgccgacacaccccaataccacactaccgacttagaggatgacctgcgactgcaagcgtcggagatccgaaaaaaagaccccaagtcaccaaagcttatatttcaagatgccgactctctactcgactttgcgacaaaaagatggcaagaacgctgggttactacagacattgcagatcctactaccctagatcgattcctcttgcgccccttcttcctcctcgtgagcgtggatgcgccaatcggcctccgatggaaacgatttgccgacaggttcgtgatgatacatgtgactgaagtccgagagctgattttctttttctttgattgaaaaaagatgttggagaagacaactggatccgcctgagcttgaaaagttcataatgtggaacgatcataatctttacgatcaggatactggacgtgtatacttgaccgacaaagctcaattgcgcctattcaattcctcgacaggcctcaaagagttacactcggctttacaaaccctcgacctggaaaacgaacaaaggttgaggccaaattgggaccagtatttcatgcagctggcctctcttgctgcccgaagaagcaactgcatgaaaagaagagtgggatgtgtgctcgttcgagagagtcgtgtcatcagcacaggatacaatgggacgccacggcatctccagaactgcaaccaaggcggatgtacgatacaggccagaactgaataactctaatggctctattgtccatttggctcactagaaatcattataggtccacggtgcaatcgcggggatggaggaggagtcggtctctcaacctgtctttgccttcacgccgaagaaaacgcgttattggaagcaggccgagagcggatccgagaggggacgatcctctattgtgatacgtaagtctacttcattcttctatgaactgtttcaaagacaaaatatcttactgtggatttcagatgcccttgcttgacatgcactgtgaagatagcccaagttggaatttcggaggtcgtttattctcaagggtacaacatggatagtgacgtaagtcaatgcttgttcattccaagggttctaattaatctaatttgaacatacagagtgcggctatcttacaagaagcaggcgtacggctacggcaattccacccggtagctaatcttctatgccctcatttctctttatgcataactgacttcataacagcctacaaatgggctcatcgttcttcaggcacccaagataccagtcacaactgaaacccaataacccacaatacgacagtaaaggcgcagggcatcccaaccttaagtgaagagaaaaatgcacctgcatcagtgaacatttccaccactcagggctatgtcaaagttattgtacaaagtaacttgtccaaataacattgcaattaaagggaaggggcaaatatcctagggctattagtagttaactattgtctcaagaaaatactatgactcacaggtacttataaagtatggaaggaacttagattatatagtaactttacgctttgaagaagtaccctaatgtacttattttctccgcattttgtccggcagaaaaaaaaaaggtatgactcagcgtgcggattttggcgggggtcttcaaggaacccctcgacggtttttatagctggatgcttttcggtgttggttcaacctcgatagtccaataccttacccgcttccagctgcgatcaccattgtacttttggcctaagttcctacagccatgcctaccgtccacttgctggactacgtggcggggaacatccgctccctggtcaatgcgattaaccaagtcggatatgatgtcgaatgggtcaaaaccccagaggatgtgaaaaatgccgatgttagtcaaatcccgaatcaattccagcaccattggctcatgaccatgccgttgctaacagcagaatcatagaaactgatactccccggtgttggccattttggccattgtctttcccaacttgacaaagggggatttttggagcccatccgacagcatatcgaatcggggaagcctttcatggggatctgtgttggcctgcaagcccttttccagggctcagaggaggacaacgacgttccagggcttggcgttattcctatgcgcattcaaaaattcaacgacacctcgaagagtgtaccacacattggatggaattctgcaatcaacacgggatcagatggcacaaaacacgaaagcttttatggtctgaggccgactagcaagtattattacgtccactcctatgcggccccctacaacccgggtgtattggaaagtgacggctggtctgtggctacagcaacatatggcgaggaagagttcatcggtgctatcagtcggggtaacatctttggcgcccaatttcacccggagaagagtggtgtggcggggctacgggccatacgcgcattcttgaatggcgatcaattccagtcgctctcacaggacctggtccttggcaaagaaaacgggctcactcgtcgtgttattgcttgccttgatgttcgcacaaacgactctggtgacttggttgtcaccaaaggtgaccaatatgatgtccgagagaagagtggaacagatgccggcggcagcgttcgcaatctcggtaagcctgttgacatggctaagaaatattacgaacaaggagcagatgaagtgacctttttgaacatcacctctttccgaaactgccccattgccgatacgcccatgcttgaaattctgcgacgaacatcagagactgtctttgtgcctttgaccattggtggaggaatcaaagataccgtcgacactgatggcacccatgtccctgctctggacgtggcaacgatgtatttcaagtctggagccgataaagtcagcattggctccgattctgtctttgccgctgaggactattacaacgccggtgaaaagttgagtggcaaaaccgcaatcgagacaatatccaaggcctatggaaagcaggctgtcgtggtgagtgtcgaccccaagcgggtatatgtggataagccagaagacacccatcaccatacaattaagaccgagttccccaactcaactgggcaaagctactgctggtaccagtgcaccgtcaaaggtggcagggaaactcgcgatatcgatgtgcggcaactcgtgcaggctgttgaggccatgggagctggtgaaattcttctgaattgcatcgataaagatggaagcaacagtggatttgatctagaattgatcagagatgtcaaagcttcgatcaagattccagtcatcgcttcaagcggggctggtgtacctgcgcactttgcagaggtcttcaacaaaaccaccaccgatgcagcattgggagcaggaatggtaagtttacattcttccaagtattattttctttcacaacagagtctctgaccatgtcccagttccaccgtggtgaatataccgtaactcaagtgaaagactaccttcaatctgagggattcctggtccgccaatttgaggctgagatttaaagactcggctattcaaaggtgtgatatcttcacatgggcatattttgcaaatttcacgtttttatacgagaatagagaatagatgtcatgggggtcaagtccatcaaccaagatactatacagttcaaatgtgaagcacagaaacaattcaatacacaagatgtttgagataatggattccaatagaacgtcgaagggcccggggccgatacagctattggcccgcccgggaagtcacatgatacactaaaggcggtctacagggcggtggagacagacacaaatcatctgacttttcctcacttgccacttcaccttctcctctccccgagtcaataaccgcggcgctccaaaagtcctatcctcaccacccacgcacctagcttctttcttgctaaatttcgattttttgacgataccctgtcggccttgatcaccgaactatattacttaacagctgcgacacctcggttttggtcgtttgacagcgaatttgctcattcctaacaggtctgtataactgggtttggtgtctgcaaggatcttcaaaaaggtccgacacaggtcagggtgctagggtggctctgcgaatcacttgaaggacggggcagaccatcaatctctcttgaatacaccttttttttaattcagcgccagtgttcgatcatcgtattcatcaattccttgatctccatttgtatgcagtgacctgaacactcaccattcagcattcaaaagattctcattcacacatccattgtctcagtggtctattgatccctgcttttttaaaaaatatctcgtgctttctctgtgatttgaacagataacgtctgttgcccgacctttctttgttgtgcctggtgatacaccagtttcacttcatctcacgagtttttttttcattcctctctttattatcccctattgctcactgtacacggcgacggtgcccctaaatctgggtcttaatacacctacggccatctttgttgcacccatccccctcccaaattgaatacaatgtcatcctctgttcatttcaaattcaaatcccagaaagaaccctcaagggtcaccttcgatggcactggtatttcggtctttgagctcaaaagagagattatcagccaaagtagattgggcgatgggagtgactttgagctgtcgatctacaatgaggacactagagagggtatgttactttgttccaatgtgtttcatttgctcctgactaacagcaagtcttctgagattcaatagaatacgacgatgacacgactataatccctcgatcgacttccgtgatcgcccgccgattgcctgcagcgcgccctggtaagggcggcgctgctcgttatgtttcaggcaagatgccagtcaatgctcgcagtgctcctcgcaacgaaccctcgatgagccgagtaacacccggatcagggcaatccgtcaacaacaacgtcctcgaactcaataatgcacaaacagaagaagagaagatcaacgctctgttcaacctgcaggctagccaatggcaagagcagcaacaagaaatggcaaagtaagcacacttcaaccggatgtttgattatgttggagatattaatataatttagcgcaacacccgtaccgtttggtcgtggcagagggaagcccgtcaatgtacccgaccaccctccgcctccagggtatctttgctaccgttgccgggaaaaaggtatgcacctctaatcaaatcaccccacctacagaacgctgacctttgtacgcaggtcactggatccaagcatgtcctacgaataacgaccccaagttcgacggcaaatatagagtcaaacgatcaaccggcataccacgttcacttcaaaccaaggtcgacaaaccagaatccctagcccccgatggctccaccgaagattcaaggaatacaggggtcatggtgaatgctgatggcgactttgttattgcaaagccagacaaggcagcctgggaattgtaccaagaaaaggcgaaggcatcggcggcggcagcagctgaggcggcagctgccgaggagagcaaagcattgcaagctcgaggtctggagtgcccaattgacaagaggatgtttctagagccaacaaagacaccatgttgccagaggacatattgcaatgattgtatttcaaatgccttgattgaaagtgacttcgtttgcccgggatgtgctacagagggggtcttacttgataacctcacccccgatgatgaagctgcatcaaaaattaaggaatatgaagccgacaaggctgaagccaagaaggagaaggacaaagtcgtcgcaggccctaatggtactcctatccccgacgtctccgaaactgagcccaaggagtcttccgccaccaaagagcagagcccactcaatcaaactcaagagactgcgtccacacaatccaggaaaagacccgctgaggacgagcctattagccggaatgaaaccgcgaactctgagccgggtaacgtgctaaagaaacagaaggcagatgatggtcattccgacgttccgacccaggctaatagcgtccaagacggtgcgcctggtgttgccccagtgaattttaataatcaggatatgcccttcaacagctttggaccaatgcaaggcatgcctatgatgcctttctcggctcctggattcggtaatgaagccatggggtttatgaaccctatggcgatggcgtctgccaatggcttccccggtggaatgggcccaggatggaatcccatgaacatgcctttcaatcctctccaagctggaatgttcgatcaaagcaatggtggcatgcccaacggatttcctaacatgttcaatggagacccttcaatgatgttccccatgccccagaatgggttccaaggcccaaactctggaatgaacaatttctcaaatcagcagcggacggctttcagcacaccttattcccgagaagaggattcaccgtatttccgtcaacctgtgaatccgcaacgtcatcaggctagaaaccgacgggttcggcctagtgattacagggagctttgaatagagaagtggtgatggcttgcatggatttgcattatgttttcctagtacacactgtgtatatgcatattatttacagcggcttttttttttttttcctacttattctttttttttctgtgtttctttttcatctcattctgaagaggtttctttttgaccttcagaacgtgtactactaccatggccgcaataagaataatccaattcatcatagtttcccacctttgtaataatcactttgactagggcttaggaattaatatcgagtatcatgtggctataatgccaccaatccgttcaattaatatctactgttgggcagtgtaactacttagttttaatagcaccctcttcatggacatgaaaacccggtagaaatcatgcataggacaagtaagccatgatatataacaataataattcaccagacgaagaaagatgaggaaatataaaatgatttcatattccaaatgcagagggaggtcaggtgactgggcccattcacaccgtctctacttccacaccgtccactccgtccaattccgtccgcttcccctgttcaacatcaatcagaccattcgattttcttctcaaaaaaacaccaaccgtcttcatcgtgtcttctctacttcctttaaatttcaaatttcaacctagttcgatatcttgacctacaccgctcatcaaatccctcccaaaacaattatctgaaagatcaaccatcatggcgaaatatatgaataaccacagtagtaattgcaatcaaatgcaacggttcctcgaccaagactcccagagcactgttctcgctacttgctacagtgtcgagccgtctacctccaaggtccacggcttccactactgcactaccctgggcgccggtaagtatctcgtaaccaaacatcatctatgtttctcgatctaatcttgagattaggggtacagtggtatccctgaggtcccttcggggactaaatcgtctcttacaagtcctccccacgacatcctcgattcccgcgcggatcgaacctggcctggaaacagttggccagagtacaagggggaggcaacgcataacatcccggaagagtgtgagagactcttctgtgacagactgtctgcgacattcctgggtgagaggaaaatcgtgggacaggagtcactggggatggatgcgttccgaaatgtccagtcaaatcaaatcgggctccagcatgctcgaatccagcaatggatagaagtgtgggattacaccagtgatgctatttaccgtggatttgtggctgaacacaataaggagcggaccttgttcgttttcttcgaggaccgtgcacttgaacacggcctcaagtcagggtatgtacgccccttgtgtttccttggatgcgtttccttggacaagtcaaggctttccccttttgcctagtcacagtcctccatgtgtgtttgattcacctgctgacctttcaccccccttagcttgatcgctctgttcgaactcgccgatatcgctacctttgggtgttcgcaaatagttgcctgtgtcagtcgctcccagcgcacagatgaaatggagcttgtgcgaagtttaggatggtgtggattcagcctcaccaccttggcgccttgggtctcacacagtgatcaaggaccctgccttagtaataaatggcttttcttggccgctgaagtctagcaatagcatcattgtgtgatgcgtttatttcgtttggattggagttatggattttgcttatgtcctgatgcttgagcttttgcacaaggcgactgtccttttattctgactatcgagtattgcttcttgcttccttattttgatttctttttcatgcgtattattgcatagttccatataactatacactattctaatgaaattgtcactttcccccgctttcacggggaaaaaaaagccgtgaccgatacgataagagataagttatgtccatatgacctcactcccaggcctgctttcaccattcacctaggtatacctccctttcaacattgggaagccttttaaggtctctcggagtggagcatcctatttaaacatctcccaggatgtctaaggagcgtgtcaaaagactccagttccccaagttcctccttccctcggtgttttcaaaacaaagtgcggggctttctccaacagaccgtataccccaaaacacaaagaccacgaagtatcttgacggtcatgtttcctatctgtgctgtgcaggctgtgcctcacatctttgctggacttcccaaattattagcaaaggatttacaggtcgccatggccgtgcctatcttgtgtccgcagagccagtagccactgctgtgtcggtcagcgcctcgtcttcgcctacagcctccctccccaatacggtattgcagcgtccagttcctcgccagcttgtcacaggggcacatacagtcagcgatatcacctgtacattctgtgacagtgtcctgggctggaagtatgttgcagccgaagaagaatcacagcggtacaaggttggcaagttcattctggaaaccaagaaaatcgccgcctcttcatgctgggaatcctcacctggtgtggatcagactatgaaagccgaccgccaatatggaatccagtctggcccagcaaatacggagtttgacagccaggacgaggatgagtgtgaggatctgttcgccggaatatggagccctggacttgctgcacgtcgaagaaaccgtcagatcaaacgtcgacctgcgatgtggggaatttcataagttgcaagaaatcctagggttggacctcgtgggatgaggtcattgcgtaatgtgatatgatacccttttcaacaacgttgtctcgcgtttttttctattgcatacgaatttattataatagtagccaacatgagcttgcgatctatgatttgtatttttttctctttttttttcccccggaagcctagcatttcgtacaggatttgattcattgaattcattagcactctggtaattcagatgagttcgatgatatatgaaagagaaactatgtgattaagcctcctatatccctacacagacggtgcgacttgacagggggcgtagataggtacgtatggtatagcaaggtagtagtgaagtaaacagtaaataccagagcacggcttaccctgcagcattttctctacacacttcctcgaaggcttgtatttctgttacctcctcttccacatgaataatattcctcgtggatctcaggctaatattttaaaacagaagctgatacctgtatctatgacataaagtagtagcaacaatgactcctccagctacgataacaagtccagctctagtcacaagtagaagagctatggcggcaacaataacttctccggcgatagcattactagcaggctgttaactaaggccaaatattcgtgattcctggagatcatgtgctagtatatatatcaccttgggtttcctgaacaagggtcgtaatcagagtcgttcttcgtcgtggtcaaagcaaccattagacacaagcgaatgtgctaggatatgtctttcggaaactggcatagcgaggcacaatatacgatttatctacgatacttcacggatcaagaagcatatctgcaagttttccgatatcgtcgatacgttttgttgggttaataatgaagcattatagataactagctattacggcagtagacagatagacagactatgtatagtcatttatcctatttagttcgctatacattcgatttgacgaaaacataatgaagtctgattggataaagaggatactgccagtacatttaatatctgttctggcaagatggccgagtggttaaggcgtgacgtttaggttataaacccgtcatgcgaaagcgcgtgggttcgaatcccactcttgtcatatcatttttttccccctgccgatctctgcctacgtacatggacaacaatcaatttgatcctacttaccaataacctggttaagcgtgactagcggcagattggctaggtagtagatgtgtgttactagcaaagaaaagaacagcctttgaaaacacccagcttattatgtttcttagccatctaaggttgtcaaattgacaaaacgcctttcttttctatgtccctttaagttagcataaagatcaattcctcgccatataagctttgaaatcaagggctttcggcgagaaaatgagataagaaaagaaaaccccgattcagccaaaggacacaagaccaccttgtttacgaggaagcatcgtcaacgcgagaccgcttggagtcattctccgcgggttcctcggctggtcttttcgaggcggtttcaggttgctgggttggctgctttgcaggcttacgtttgacaaaggcagacagatctgttgctcccttgctagctgcatcaagctgggctttctggtctgttgcggactgacccataatttgacccagaactccctttagcatagcctcgttggcttggtcgttctgctcaattgagacaggggttcggcgcagatcaacaagctgatttagttcattattaatgagttcgaacaatatgtggcaacggcagacacgagagaaaaacttacccgttgctccatctcagtgacgatctccttgacattggcgatctttcgctttgttgcagttgccttgtcctcatccccatctttctcggcctcaagtttcttctcctcctgggccattcggaccttgcagctcgtgatagcatactccatctgggtggcagcttccttcctcatctcttcatcaactttgggtttatcgttgttatcctcctccccaccttgttgagctgatgcgaattccagggcgagagagagcttgtaatggcattcagcaacagagggatcttctagaggatacagcgagttcctcaattcgagaacagttctcaagtcactaaccgcttctctgaatctctctgcttccaatgagatctcagcttgaagatcgtgtgtgtctgcgattctttccttgatatgctttgtgtccgtggacatcgtagtcgattttcctttgccctcatcattctcttctgcggcactcagcttcttgaggtacagaacacgggcaagatctaggacctcaaaggcattggcgaaatcgtcgtcttcttcatcgtcctcggcttggtcagcaggttcctcatcctcgtcctcggagtcgacaaaattctcgtctcctgtaaactgaaagaatggcttagatgatgtgggctctggttctctgcctgcgcgcttagtggaagacgacttttccgccatcgaattggtgatcgcgtcttggacaagggaatcactggtggatttcgacccagcggaggatatatttgttgaagatgctttgccggattgtggttgttgttcgccggctactttggagccaaggacatcacttttactcacagccacgttgtacaatgactttccgtaggcatagagtaaatcggcattctctggggataattcgccgttgagttcggcctgaagctcggtagcttgggagtacagctcagaggcagagtcgtagtctttagtcgcatctttggcagcagcctgtgcgatcaagtcatcgagttgggttcgtttctcttgctccgagactgtagattgaccgtcctgtggatcagtcatggtgaatgcgatttatgtgaagagtagtgaaagaagaaagaaacaaattgataagaagaaaagaatagcctttcgaagaagtaagagtaagattcaagtaggagagccgagtgatgtgaaaaaaagagtgggaggagattgaaagaagaagctttagctccggcgcgcgtgtcacgcgtcttcgatttaattgaattctggatctctgtctctctccctctctctttcaccccgtctcccctcttattatgcatatactctgaatcatttccaaagccttttgtactctcacttgactttcgctggagcttttgagtcaattccaactctataaggcttttgtcgcgtttcttgaagtcttgggacaatatggacgcctcaacaccgcgacatcctgatcgcttcagaatggcgacaggggatcctattccttcctcctcgcctgcatttggaacaccagcacgtccattcagaatacccaagggaaatgcgcctccccctaaaacttcgattttaccgatcttactccctccatcaaccctgcgcccaatagcctttcgaaccttcacccgcaaacataatctcacaatatcatcacccgcgcttcaactattagcagtgtttgtgggcaagaactgtggctcaggatggcgcgaggaaggcctagcagagcgagtcctggatgaggttgccaagatatggaaaagagccggcggaggcgtgattgtcgaggacgggaaaggagcgtccttaaagacaatactgcaaacccttgagagcagtatgagtgggggaagggttgttgcagggaaagcgacttcccaaaatggttccttgaagacatccaccctgggtgtagatgatgggcgggttgaaacagccgctgatacctcaaaacaaggaactgccgaggaagacgatacgcaattgtcacttcagccaagacattggctcaagatgattgatgcctttgatcttccgcgcttgacgtacaacgtcgacaagaaatacttcgaagccgtaaagtcaaagccatccttgtttccatcaccatcttacaaaactgcactattccgggatcgatacaatcttgtgtatcagcgattgctccggaatgaatcctttcagagctcattgagtgtcactgctattccttcactgcaacgttcatcgtccaatcttgcccaccgacaatcctataaattgacgccaatcgcaaatttgctgggaagaagtggaagctcgcatttactattaggattgcttgccatttcacctactggagacttatccctggtggacttgactggaagtgtagcattggacttgagtcatgcccgaatgatacctgaagatggcgcgtggtttgcgccaggcatgattgtgcttgtcgatggcatctacgaagaggaagagatggtaaaaggtgctgccttgggagggaatacaggaatcggaggtgcaatcggaggacagtttgtcggcatatcaatctgcggacctccctgtgagcgacgtgatatctcgttaggaacgagtaaccgccacggcagcggagagctgagttctagtggtggatttggatgggttgactttcttggattgggaagtgaacgtgcccaaggtgcacgaatgagaagaatccaggaaaaatgcctacgaggagaacaagacgcagcggaaacgaccaggctcaaaatcgctatcatgagtgaagtcaacctagacaacatgaagacactagacgccctgaagaaggtcttcagcacctacaatgatctatctcttcctgaacgcccacaagcctttgtcttgatcggcaattttgcgcagaaagctatcatcagtgggtgtggccgagccgggagtatcgaatacaaggaatatttcgactcattagcgctggtcttatccgatttcccagcgttgctacaacactcgacctttgtctttgtgccaggtgataatgatccttgggcatcggcattctctgctggtgcagcctcaacaataccacggcaacctatcccggagttgttcacctctcgagtcagacgtgcatttgcaacagcgaactcggagttgaataggtcacaaacccccgaacccgcaggtgaggcaatttgggcctcaaatccggcacgtctttcgtggtttgggccagtgcatgacatcgccatctttcgagatgatatctcgggaaggctgagacgcagcgctgtcaacaccactcttgacactgagttagatgttacaatgcatgagtcctctagcagtgctactggtgatgcggtccttgctgcaggtgagaacgaggtcgaagacatgggccagcaacaaggcaccaaggctgcgaccacctcgtctggggcgttaatggcccgcagactcgtcaagaccatcctagaccagggaacaatctccccatttccactaccattgcggcccgtcttatgggataatgcctcagccttgcagttgtacccgctgccaaccgcactggtacttgcagacccggaagctgcaccgttttgcatgacttatgaaggctgtcatgtcatgaaccccgggcgcttgctaccggaaggtggtactcccatggctagatgggtcgagtacgatgtgttacgcaaccgagggaagatcagggaagagcgctgttaacctagttgtaggaacgatctaattgaatttcacgcatcatgaaaggaaatacatttagatgctatgtcatatcgagacctaggaatacatcgtgaagagaaccttgtagttgctcttatattaagacggaacaggcttaagaaagctttgagttacacaaaagccatggggagaatggagatggaaatcatggatggatcaccacaatgcctagtcaatggtgatgacatcggtatttcccctagcctgtggagcagcaggtgtcgagcccttgatttggaattgtttcggggtttgctcgggtttgacttccacttctctgtcgagttggagatggggagcattaagacacccgtgcagctcgagaatgaggttctcgaccttgttgatactcgctaccgctccatctccgaggccgttccaaccatcgcctttcgattggtacagtttctcttgtataaaagctgcgacctggccgcggccagactggtccattccattggcatcccttaacatccagaccaaacggtcctggtgcatcacggcactcaagtggaaacgagatctcagtcggggatagtgaatcaggtatacagtcggttttcgcgcgatgatttgcacaattgacagatccgtctgattcgactgaggggtgatctgatctaatgaccgcagcaaaggaagcgtggtagctaagagctggagggttgattcaacaccggcttcagtgaaccgctggttcaaagccacagtgaggggctcttgaattcggcgatgagggctagagccttcgaatttgatgcccaatttcagttggaaaagaggcttagtcttcgaaatagcatctgcaacgtcgacgtagtcagacaaagaaggcccctcggcgctgatatcaaagaaagcagaaaatttgttctcgtgcccataggcaaaattaattcgtgacaaggacaaagaccgaggctccattcccttccgtatgagggactggaggatagagaggacacactcgagtcgctgcaagagttcaaacagacaaacgacaacagaatgaccggctggcacaagcaaacgaagcgcgaagccagcacccttatcttcaatgatcaacgaagaatccatctttgagacgagtgggatcaatgatttgatacgggttttcaaagtgccgtgagccatcattatgacagagcggctctggctgtcaactccatggaaaaccagtcgaaccatttctttgaattgcgactgcttctttaccccgaagggcaagcttacccggaaagcaggtggaagtgcagacgagctgtagttgaacaaaagatccgggactgtgagatcctttttcagctgcaattctttcaacgaaggccagaaatgcatggctggcaagtctgccagataacgcgcattggcatggatcgcgaggattccagtgagtccatggaccagctcggcacacgttgtgtagtcgggtcgtctctgcggaggaacgagggtttcactgatcacgtgggcctgcggaacactcatgccaatattgtaaaagggtcccgttttcgctgcctcgattggtcgaagttgaacaagccaccagcggtcaccatccatgctactggttgctgcagcgacccaatgccggttccaaagccggtgggtgaagaaagcggtccgcattacaccaggagggaacagcttgcgaggatcaagcccaagaaccctttggttcacaagttcgagaccgagtgcctttgtgccggagcaaatctcatccaccgcagtgatacatcgcactcgggcgacacgagataatatctcttctattgatgatttgtagagcgctcgatcactatcgagacgctccaacacatgcggtgtcccacacaaggtaatagaccccgacataggttcgatagaaacccgaagagaacgtgaggctgtgagttgcatatctaggcgacaatctccaggttctgttggtgataattgagcctgtagtgatagtgtgtgattcgagaaaagaagatgctttttgagggtggtgaatgtggtagaaagaagatgtgacgtgtgtaatgcgataacgctcctcagaataagctccatagacaggtcacctgagttgaacctgatggcatcgctgctgacctgctggccatcacgcatccatcggaagccgagatgagatatcccaggtttcgggtcgctagaactgccaccgcggtgaccactcttgattcctatttcgagccagctcttcggccccgatctctgaggccaatattgaacgacgagtgttcggtgcaatagctcaatacgcaacgcatctgcccaaaggccccgagaaaggtccacggcttgcttgaagaggatgttgattttattcgtaagaacgagaccgtggagaaattggaagcatcccatcaaaccatcatcgcgaagaagatcattaatcttaccatcaagttcattgaatattcgaccttttgggataggtgatgatggcgagaaaaggaagcgaatgtccacgaagaaaaactgtgattccttcgactcttccgcgactgagagatcaagttcgaattcaccagaaattgtgaatgttacccggccatcatggacccggtactttcgcagtggcggcggcactgaatcgtgtaaagccaaccgcacactgatgattcggttgagtttcagtagctttttgagtgttgctcgtgcagttagtggggtgggaggtttgtaaccgagctggtaaggatgttagattattataggttaggaacattgaagaaactcacatctggcaaagaggctactcgtccctttgataatacctccaccgctgtttttaaatccgggttggcaacttgtgctcgaacaagatcgcgtttcacttcaccgacatactgaagagctgcgtcgtatgattggtgccgtgtgcgaatgaacccttggatatcaatgagtctgctgacatctgcagcttgtcgactccattgcgagaggactaggagtttgatgaactcggctctctttgcatgagcgaaatccaagagtcgcgacttcttatgcacattctccgatgactggttaccggctggttttccattggttggcatcgaaccacccgaggctggcacttgtatcgtagccaattctgtaatcaactccgagagctcattccaacattcctgtactgagcgattgaccaatgtcccgaacggaaagaacccttgtgtgatatgtggcagcttaaatggcgatgtcggcacgatttccgctgccttatctgggggcgttcttgtatgttgattcgaagcactcgatgcgccattggcataaactgatccattcatgccggagagatgactggatttatcggcattatcaaaggcagtaggcgcatcatttctggcctcattggggcctgggcgccgaacagatccctcgatgttgacattgtccatgatgacaccgggcatatttggaagtacagcttagctgttttgtgattgtccgtcgaagctttcccctccttggccctctgcacggcgcagaacaagcgacgcaacacaggcactgctccgggctcgatctagtcggcgctggggtaggaagggaagccgaaatcgaagataaggccacaggtagatccttaatatgatgccatgcgtttcacggaccgtgtaagaagaaggccacgctcataatcggaggagcttggcgcacggcttaggaatcgaatgggccttaagacggtcagtcgaggctctggcgatgatggcaacggatcgggatcggaatcagtgcgaaatgctccggatcgcacaggtttcgacttcgatatatctagcaactagctgtgacgagaggtgcgatcggggatctagatatttcaaggataatagcagggttgtcgcaatcgaggaacgcagcaaaacaatctggtgggctgcaggaaacgaaaggcagaataactgccgaagtaaaatgaattcaaatgttcatagatattctggaaaagcagcacctgggaataaagtgtgcccagaagaggactggtcaacaatatctcaagcccaagatgatttgatttgatgaaagcgcgatgcgctgcatgcatttaccataccgcctttgatttggtgccttggtgcctggtattgtgatgtatcaatttgcagagtgtggtaatatacgatgtattattggaagtaccgctacaatcactaaaatacaacttaacactggtcctgaagttcctagtgacttcctgtaccataccttgtgaaataccccaaccccagaaagtcaacattggccgtatgacctcacctctttgataccgtcacccaactacctaccccctaggcatcgttaacccaagtcactttgaactgaattttattacctcaaaatactatatgccttctcatttgatttgtttctggccatgaatttggctttcccttgccagccatgagtatacaggagaatgtcgagtctctccctcaatatcttggtgatgacacccggccgactagcaagagggagcttgctggctggtattgctatggctgggctgccgaggtctttgtagtctgtgccatgggtacgtgtgattctactttcatagatctgttttttgcatcttcatcctagactttttatctgatctgtgaaaggttcatttcttccgataacgctggagcagatggctcgggatcggggcgttctgctgtccgacaaaacgacaccatgcagcgcaacctggagaccctcgctgccatcaccaggctcggatgcaccggtgtatcttccccaggtgtcagatggcggccagtgcatcatttacttcctcggcgctgaaatcaacacggcaagctttgccctgtatactttttcattgagcgtcttagttcaggcagtcctgataatttcaatgtcaggagccgctgaccatggaacctatcgcaagaaactcttgattgtttttgctctcatcggctcaattgcgaccatgttgtttttggttgtggtccccaaagtttacctcctaggtggactgcttgcaatcatttcaaatacttgctttggtgcgtcttttgtccttttgaattcgtttctacctgttctggtccgccaccatccatcgcttaaggaaagtgaagaggcgacaccgtcaggcggtaatgtgacaagccccaggggcaaccctttattttcttcgaccggagatatggaccgaacaaacatggatgactctacgccgctactcgggcctaacagagaagccacaaagacgtctgcttccactatcacttccctagagcttagactctccaccagaatctcgtccaatggcatcggcataggctatattggtgcagtgattttacaggtgttttctatcttagttgttgtggtcgtgcgttcaccaacattctcattacgccttgtgctcttcttgattgggctatggtggtttgtttttaccatcccggcagccttgtggctgcgcactcggccaggcccacctttgttgggcagtgacggcaaaccgctccattcgtggatctcatacatggcatacgcctggaaatctcttggaaaaaccatcgcgcgggcgcggcagctgaaagatatcgtgatcttccttgctgcctggttccttctcagtgatggaattgccactgtcagtggcactgccgtactatttgcgaaaacccaactcaacatgaagcctgccgccctgggactgatcaatgtgatcgtcatgcttgcaggagtattcggtgcattcacctggagctacatatcgaatttcttcaatctcagagcctcacaaacaattattgcgtgtattatcttgtttgagctcattccactgtatggtcttcttggattcatcccggctgtgcaacgcgtggggcttggtctccaccagccttgggaaatgtatcctttgggggccgtttatggccttgttatgggtggactgtcatcatactgtcgaagcttcttcgggcaactcatcccccctggttacgaagcggctttctacgcgctttatgcaatcaccgacaaagggtctagcatttttggaccagctattgttggcgctattacggatcgctacggtgagattcgaccggcgtttgggttcttggcgattttgattattgtgccactaccacttatgcttttggtggatgtcgaccgcggtcaacgagatgcattggcgttgggagccgaattggatggcataccgcaaagatctgagtatgggaccatatctgacgatcaaaccacgggggatccgattgaagagtgaagatcaatgtatgtgtgactgtgaagtgagaagtaggggaaattgcattaagggtctctattcgtagggttttcgtttacaactaaaagaaagaagggtattcccatagatttcgtgatgttatagtaggatatatacaatagaggccacttgtcaacaatgcgtcaaatatcaagggcatgtctccgttaccattattgttatagttgtacctgtaccttattcaagtatcttgtaccttatactcgaatttcccataaattgacctggcaacggaggtaccaggtacctgaaggaaggtccgcccttgcaaccctgcatagcccagtcacaaagctccacctttagtgaacacactgtcctcaagttcccactccccaataaaaccttccctctctggatcttttaagcttgtctctactttcttctagctttcaaccttgagcattttggttgtttgattcaagatattaattatgcggtctttcgcccctctggtcctgagccttctcggagctactgcggcagtccacgctgctgagcctgaagttgccgacactgacgccaatgtcgtcaccttgacaaccgaaacctttgatgaattcgtcaaggagcaccctttggtgcttgctgagttctatgcgccttggtgcggtcactgcaaggcccttgcaccccattatgaggaggctgccacagagctgaaggccaaggatatccccgtgatcaaggtggattgcaccgtggaagaggagctctgccgaacctacgaagttgatggctaccctactctgaaggtattccgtggccccgatgcacacaagccctacgctggtgcccgcaagtccgacgcgtaagtcattctaggtttcgggttcttgtgctctggaaattaacgcgtttcctcgatagaatcatttcatacatgaccaagcagtctatgcccgccgtctcgaacgtgaacgaggagaacctagaggaattcaaggccttggacaagattgttattattggatacgtggcttctgacgacagcgcctccaacaagagcttcacttcgttcgctgaatcccagcgtgacaacttcctcttcgctgcctccaacgatgctgctctcgctaaggccgagggcgccaagcagccctcgattgttctctacaaggaattcgatgagaaggtggccgtttacgacggaaagctggaggaagaggccatccttgaatgggtcaagaccgctagtactcctcttgttggcgagcttggtcccgagacttactcaaagtacatggcggtatgtctaacttcttctgtcctcgtatttgagcaagaaaagaaactgactttctacaacgattaggccggtattcccctggcttacatctttgccgagactcccgaggagcgcgagcagctcgctgctgatttccgtcccatcgctgagaaccaccgtggagctatcaacattgttacccttgatgctaagctcttcggcgctcacgccggcaaccttaaccttgagcccgagaagttccctgctttcgctatccaggacactactaagaacgccaagtacccttacgatcagactaagaaggttgatgccaaggatatcggcaagttcatcaaggatgtccttgagggcaaggttgagcctagcctcaagtccgagcccattcccgagactcaggagggatctgttactgttgttgttggccgcaactaccaggaggttgtcgttgataacgaaaaggatgtgctggtcgagttctacgctccctggtgcggacactgcaagtcgtaagtttttcacacctcatctaccatttgtcgcatgtctaactcatcatcacagtcttgctcccaagtacgaagagcttgctgcgttgtatgccgatgtccccgagttgaatgagaaggtcactgtcgccaaagtcgacgccactgccaacgatgtgccagattccatcactggcttccccaccatcaagctctaccccgctggtgctaaggactcacctattgagtactctggttcccgtaccgtggaggacctagtcgccttcatcaaggagaacggcaagtatcaggcggacggcctggccgatggctccaagaagcccgaggagcgtgccgaggtcacttcggcccccaaggccaccgagtctcccgcatccgatgagaaggatattcatgacgagctttaagcgcttactcgctttttgaatgtgtaacttgatatgttgtattctatgcctgaactcggacttatattcgatgccatttattccccgtagactgttgtggcacaatccagactcttgtagtggctggtatagattgaatcagtaaatagtttctccgtataattctataaattttataaatactatatttgatcatctcccagccttgcagatcaatcgcgtcgcgtgaaacgcgtcgatttcttatcgccccggattgagctcccgacaacttccaaagtcctggggttatttctccaatcttcatatttgcccatcatggtcagccctgtcatgaaacgaaaatcggagcatctctccgcccctgactcgaaaaaacccaaaggtggaagcatcactgcattctttggagctccaaagccgaaacccgcgagcgcaacttcagccccacggccatgcagctttgataaggcaaaatgggttgcttccctgacgccagaacaaagggaactattgcagttggaaattgataccttggatgagagctggctcgctcacttgaaggatgaagtggtcagcactgaattcttgaacctgaagcggttcctgaagaaggagaaagattccaatattaaggtctttccaccagaggaggatgtctattcttggtaaattggatcactctattcaggccaaatgtgtgtgctgatcatactgtaggtcccgacacacccccctgaacaaggtcaaggtggtcattattggccaggatccgtatcacaatcacaaccaagctcatgggctatgtttctccgtccgtgcccctgtacgagccccgccatcattgctcaatatctacaaaggtatcaagatcgactatcctgacttcgaatcaccgcccgataagggagggcttctcataccttgggctgagcgtggcgtcctgatgctcaacacttgtcttacggttcgtgcccaccaggccaacagtcattccaacaagggttgggagaaattcacacagaaagttatcgatctcgttgctcgggtacgaaccaccggcgtcgtcttccttgcttggggccggcctgctggaaacagagtagcgaaaatcaacaaagagaagcactgcatcctacaatccgtgcatcccagtcctctgagtgcgcataatggctttgtgagtagatcctcatctaaggacatccttggaaaccatatttgctgacaggatgatatatagttcaaaaatggacacttcaagaagtgcaatgattggcttgctttgcggtacggagaagacgaaatcattgactggagcttagtgccatccgaaaagcctctgttgcctccttgcgtttctgacaaggaagattcgaccgctttggtcaaccatttgccacaacctgtcaagcctgaggatgtcaaagcccagcctgacaatgatgatgagtttgatgacgatgacgctattgaagccctaatgtcggccgaagcagaagcttcttcgaacacaatttagacttcttgaactgcatgcatgcctgtcaccttgctggcttagaaaagtcctgcgttggctgtgtttgtttccatgttcttttacccgaggaatatttcaggagttaagaagttgggccatttctatatgtatagtagctaattttcatttcaatctattgaatgtctgtttcatcgatgtctttaattaagctcatttcaattaagctcattggttgacaacgatcttgcgagctccttatcgataagcctatctcgatctccgattcttcttctgctgagaatctcccctataagtacacctgtgatgtaaatggtttcctagatggaactcacgtggcttccggatatccctcaatcgcggagtcgcactcgagctttgcgagcttgtcccacgtgccaacgatcaaaggtacgtacacgatgggaatattgaacccaactttccatctaacctcgcaatagaaacgctgccggcatttgattcccaaatgggaacccttcaatgacccgagatcaccgccacaatcgcacgatgaccttgggaggcctattcacagaaatgactcgaatcgcgaacagcttcctgcatccgcgcacatagaccgagcgcaaacaacgtccgacagtctagctccgttatcggttcctgccaccgagcgatttgtgggagatctcaatccagaatccctgattcgcgagcgattagatgagccgactgggagccctctccgggatcgtatcgggctttggatcaactccccagctgcgcagaaagcagagcctcggggcatacagagaggacaagccacagccggagaatatgcagccaatatcccggcacaaagcgcaatcgatggccaagccattgcatcgttacttcaccaaaggtttgcggcggggatacaagcatgcgaacaactacctctcgcgacgcgccagtctttgtccgctatctatttctccaaggttaatcacatcgtgccaatagtcgaccaggaatctttccaagcccaagaagaaggctcggcgtcggtgttccttgaaaaagccatatgcctcgccgcagcaaagacccgcgcggctaatccccacttacgccttgtgccagacggcccaatcctatcgtcacgccaattctgttctgagatatataaggagctggttgtagctatggacgcagagctagaaccggatcggttgacacggatccgcgttcttgcactgatgtccttgcactgtgagggtcttgaaggggccgaggcggcatctctacatctctgccaagctatccatcaggcccagacggtaggattgcatctcggccggccgaatcaaacctccacggattccctcactaaactcttctggtgtctatggacattggacaaggtgcatgcaagtatcggtgggcggccggttcttctagctgaccgcgatatcggggtcgtaaagcccgatgtcagcgctcagacgtcgcgaggggctttcgaggtgtggcttgccgtgtcggatttgctcgcaactgtcatatcgttctaccgaccctctgcagaagccacaagcgggtgggaagagggattccctgcgtttgaggatatcgtaggggaggatacccaagatgacctggattttgctactctgggtatgtctatcatggaggtctctgctgtgctatcgtttgagctaaccgcgagtaggcttcttggagctttactatcattctgtggctattttatcctgtcggtataaacccaccgagaacatcgatagcaccagactgtcgtctgtcagacaaggactagcagctgttcgcattcactccatcgtcgcctcggagtgtgcagatgacctaccaccccttccaatcgtgccgtactctgtcaccttgtctatgggtgttgcatatcgacaactccgctcgagcagacttatcacgcacctcgaccgagcgaaagctagtcttgaagcgtgccgctccgttctagaaactcttagtccatattggtattccgccgaggcgatggcccggctgggccaaaaagccctgcaccagattcaaggcaagccacaatcctctcggacgaaccctatcggtccacagcatgtggcagaggcctcgcacaaagaagtcagcacccacggcccggtatcagaggggccagggacaattaatccggcacctcaaggcaacaattccccccgagctaagaggcaacgcaataacgaccatggaaccactgctgtgtctccgccggaattcgcgatggacgtcctccaacctccggtgggcggtctggatacatctatacaagacggatttgcagacattgacacactgttcggagagttcttagatatctctctaccgacccatttctgggatcctatttttatggaaaatcaagggcaaacgaatgatccgcagtcataatcatcatcattagaagtatatactatgtataaaaaaaatgaaagaaactatacatgatgcagcgtgaattttagtgccaagccattcgcctgtgcaaccttccatacgagaagccgttcatcaacagactgtctccaagccgaagttgcctttcggatatggtcttcattctgaaagcttcatagactcatgctcggacataccgttccccgccagatgggcgaaatcaacagtcttagtttcagcatcgaagcccatcatgttcacgttatcaacctcaaaatcaaagcccttctcatgggtcgggagaccgtttggttgtgcgttgtcatcggcaaagaaatcggtgttgcccggatcgtcaaagttaataagtgcatcgaagtcattctgggtgacttcggcatcatttgccagatccatgagttcggtgagactcatttcagagggcatagcaaaggcattggggtccttgttgtggttggcattcagattgaggttattggtgctgccgttctcgcttccgtcggagtgcggtggtgtcgaagcaaaaatgtctccggtggaccgtccgcccgcggaaggaccggagagtttggggtatgtgagatccgggatcttctgagcgagggaatccggcgggggcgtgagggtgtgcaggcgggaggggatggtggtgttggtggtcgtagagagattgaagggatctgaggatgtggtaggttgttcgcggggatttgatgaggctggagaaggctggatgtcttggggagagatagtaagctgaatgcctgctttgcgaattgcggcttcgaggaaggaggtggcgaagtcggcagaggcgtagatttcgcgcaggcgttggaggattcgcatgcattgatagaagcgctggaggcttgtcatgcggatgcttgggtcggtggacttgatgtcgaggagatgtatgatgacggctggtagaaggactgtgacaccggtggtggggtagtaccgggtcaggtcgaggcaatgcaagtcctgggcgatggcagtgatctcgactgcggcgaatcgcaccttctttcgggacatgtcttggagttcggcgtctgcggatgggtagggaacggcggggaggacttgcgggcggtgcagagcgctagatgtggtgagatagaccatcttcaacaaagcgcgatgggagtgaagcacttcgtctgcttcggatagtttcgatccgttggatggtgcatattgggtttcgacggggaggttggccagccagtcctccaattcctggtcacaacttcgtacctcgaaggtctccgcggtggatttcttcgggacgagcatcatggtggtctccatggtgccaccaaacttatggctgaggaccgagtactgggcagataatacatggctgacgcagaggcagagcttcgctttctcgatgaacatcaaggcgagctcgcgctggtggctgacattctggagaatctccgagttgccaacaatcgccacgatctcgggggagaaagggtggaattcgaagtcatcgagactcagcataggcacatcacaatcgtcatccttgacacgcataggccgtcgcatgcctagggcaatcagtcggtcacgggtgtaggtgctccaccatatccgcttccacatgcgttgccgacggatatccatccgcgagttgccgggatcccggtgaaggccgattgtgtgggctaaagatagactcacccccatccaatgccaagtgtccttttggtcgtcgggagtttcgtaccagtaggtcatgagcagaagcgattgaacaagcgagatgcggtccacctcgtagtcgaaatcgtataggagacgagcacgctggaagaagactttccgggcgaccttgcgagtctggtagccggcggcctgcagatgcttcatatcaatgaaggccacaccggcaaacatgacagcctggaagagaagcagactgatgcggtggattccatcattctggacgatattctgcaggaactcctccagatcgagcaagggcatatatgtgtggacatagtgaatatagcttttcaagagttcgttccgtagtgtcacatcggggatagtcaaggcacccttgacggccaagtagtcaatatcctctttctgaagtcgtgcgggaagtcctcggatgtaatccgggaggaaaccactcccgggtctcgtattgccgaaattggggtctaatagttgttggatttgcgaggtcacattggctaatggcattgaagcgggaacggctgggttcggagccatgcggcgtcgatagtggtcgtcggaaccgatgcgttgagcctgattttgatctgttgtttttttttggtcagccaaatggatttcttcggggtttcgagggaattgacgaacatagtagatgaggcatatgttgaccgtggtcaagatccacagaggcttgcgagggagatgtcggtaccaaatcggccaatcctgaaagatcactaaggcgggagaaaggattctcctccgagccctccggagactccgaaaggttctctatctcaatgcgagacttcctaaatcacatgtcagtgaagtttataggtaattaatttcaattgcacgaactttctgcgtttactctcggtgaccacgcactcgacctggtctaaccggcaattcgtgcatggagagccattctccaccacatcacagcgcactttacgggcacggcaacaacagcaagccttcgaggcgcgtctcttcacgggacggttatgagcggagagaccggccgtggaggcctttcgtttcccagattcagtatcggtcatggtgtgttattgtgttcgggggcgactagggaacattcgagttatatagagacaccgggcatgtgatagagagccgaaaagggaatgtcacgatgtgtgaatatgtgaaataggaaagaaataggaaaataaaaaaaaagaaagaaaaggaaaagcaagtcgaaggccgaaatggagggaatccttttttatttaattgcatcccgcaaggtttaagtatgccccaggttcccacatttttccttaccatggttgaacccgcaaacagccaaggtttgaggggagtcgatccgctaggaatagattacggcttactgttccccccaggtattacagaaaattacccagttgggtaatatgccactacaaagtcagggctaagacccgtcagactggggtaccttcgacacctctctcggcccggtcacgttacgtctgctttggacatgtgaaagtcgatctatgatatcattctctgcatatgccaatatatgagatattttgaattgcaatattcaatgtttcttttgattgctctttttctttcccatgccaagtgggccctctatcctccgaaaaacaccgggctaaaacattaataaataaaacgccgtgaagatcctaaattgcgggtcgaagtcgaaaaaaggggaattttccagtcttttctcacattccccaactgtcccaaccgccaagactggagactgagttctccagtctccgaccagcggagccgatgtggaggcattttggcccgtttgagtcgacgtctggaccgatgagtaatgtgatcagcactcttccaaggttggtttctgcttattgaacggtgtcgatatatgttgtatatacatccatcttctggactatacaacgacaatcctactccgtacactccgactatatagatcatggcagggttgaaactattgattccttacataccgactcgacctacgtaatagcacggtcatcacggctccgcacctggacagctctgttgttattattaatcttcgaggccgggccttccacagtggaacgccattatcgttccaatgctatgagacaattaaattgtcctttgtaccacatggacaatctgttctacttgtactctctgtgctacggcttacattaaatagtgatacactcagacttgactcaccaatattatatcgtgctacccacaatccacaagccccggaataatgacaacaaccggaatcgtggagtacccctgaacgccaaaatgaatttatatcccgcaccgtgttcccacccggcctgccgagttagccctcacgtggaccaaaagtgccgatttccggaagaacgtccacattctcaaagcacatcttcatgaacgggttaacggggtacccttcattacttttacttttaggactgtccattccgttttgaaatatccagagcgcaatgacgccatactccgctaaaagcctcagacctggaattcaactgaaagtccaatggagaattctgtctctcacgaggtcgaaagcggatccagtgggacgccaatcactacgatagcaaaggtcaatgctggcttcttttttactttctttttcttttctgttctgtatctctttggttttattaccggatcctcccttggaaattccatctgcttcttcccggcatattccgtcatccccagaccaaatccaatgaatcaccagatcctggggtagagtaccatgccttttcagatcgtgacctagtgcctctttagaattctttggatcggaaaccatcttgaaagtcaaaaccttatgctccgatacattgccgactctgccatccgaatcggaactggtcggttccagccttggaaggtgaaatgttactcaattgtcaattcttcagtgtctgcttccaaaccctgtagatcgtgataacagatcaaaggtacggagtaggtacataaagtggcctgcataattatgcttcttaccgcctttttctgccgtctatgtatctatgtataaaacttatccagggagaagatatgtaaaaaaaaaaaaaacattaaaccaactgattcatgtcgttctcaatgacaaaggccgcaaatgtaatcatgtggtccagcgcttaaagcaggcgtacggactgaacatggcttgcgtctaggctcggccaatgccgacttgtgatattcagtcccggaaaagcggaatgaaaactcttatattacatatccctgcacatgaaacttgcgcaaatgcaactaatcgagtcatagctgcaggactgcagagcacacaagtccatacctctcagacatgtcgtcaataaatattgacagtttgaacagctcagcagaatcgaggataatatatatcgactcccaaattgccaagcactcgataacaccagtagccagcagaccaagacggcagaccggcataattgcaccccacatttcgccagtccggggggaaggccgagtctcagccacagaccaggtcggcttagatcatatcctctttcatcccgcacatgggggaagtcgggggtcatggcgtacatgcccctccaaatgcgggggaaataggaaactccaatgagcgtgaatcattggctgtgatcgctggccacagggtatgataagtgaatatttccgcatgactaggggacgcgggtcctcactcgggccaaagtgccccatacccagcgaatttaattaagtcaccccgcgagaaatcgccgtttccggggaaaaattgaaataattattctttttttcttttcatttactttttggtacggtggcaagaattccatggttctagcgtgtatataccggtattctacgattccttctaactaatgtattgaaactgagtaagctcggaggttgtcgccaacttgggtagggctatttccttggaacctttcctatgtaggatgcctccttctactccgtacacctatgcctcttgggtgtgtgcttgtcacttctattcttgcgagagttgcggctgtggtgtacttagcatcgccacatcggttaaacttgcaaatatgcgacagactctacagacaggggcaagactcgaaccgcaagaaaaacctaagaaagtggcacagcatccctgcgccaatttctgtcgttccaaatccaataaacatgagaagacccaccactctggaatggcagcgaagatatctgcactagtcagtgagggtaatctatataaatgaacaggctagttgttagcaggacgggtgagccactgctggttctttgcctcgaaacgctctgcgctggcggtggccaagaaccgtcggcagtgaagctctacgctgaacctcgctgcttgagtgaaattcgactgatgctaagagaatacatattttgctgtgatacagcacagggagtagtatgtgctgtcatcatatagaatgttattggacaatgcatgtttctccctgcaggtactcatccgcctacagatagccagtcgtttgccccattattttcttccgatgtcagctgctcatgtataagctagctgcggcttgggaaaataaccaaggtacccctcgacatcagaaggagcatagtgactcccaaggttgtgtactccgtagactgctgacttggcatccaagactctaatgctccaacgatactaaccacttattaactgcctaggatgatcccgaggtcatgaaaagcatataatggcagttgatcaatggaatcgttatatcatttcatatctgttcagtagtgatccaattcgaattccaatcaaccctcacgcccccttgtctggaccagacgccgaaaaataaaagtagacataacatcataaaccaaatttgggtaaacgcaaatcactctgctgccggggaatcaaaaaagaccaacaaaacaaaaaccggaaaggagaatggagaaagaagaataaaagtcaaatccataaaacatctaaacaccaccacggcccatcctctcaatggaactcatgatcccgcctcgaccgggagtaggcattgcaatgccagatctgccattgccaccgctattgccacgagaatgaccgccaggagcaccgaatctagggatcctcttttccgtagtggcagggggacggatgcttccagacacagaacggctgacactgcgacgactttcatcaggggtgacttcgcgcgatggctgagctggctcgttgacgtggtcattgtgcacagaagatgccacagagggctcgcggtctcgaggctgagatgggacgggcggctgctgcatggctagccactcatcaacagcagcaacaagctcgcccttctcggcgcgttcagactccaggtctgcacgaattcgctcggtattttccttcatagcaacaatttctcgctgcagacccttaatctgggccgccatgacacgcttttcggcctcgtgcttgtcattctcgcgagcgaagagactggtattagccgcggccattgaatcagactgcgcggtatcacgttcgacgcgaagatgttcgttttcctcgcgtgcagcagttagcttcttctccgcctcgcgcaagcgcttctcccagcgagactcgtagctctttttcaaggccgcaaccttggtttcatgcttgcccttgtagagcacatgaagctcacgagcgaccttttcaacagcatcctgaacttcccgagcagtgtcttcagctgagtgagaggactgatgagatgagctggcgttactggcgctagatgcagccgcagcgcgtgcagcggaaagctgactttcgagctcaacaacttggccttctaaattttccctgtttttctcggcctcttcggcccttcgagacagacgctcacgctcacgatccccttccactaattcagagcgggcggaccgcagcactgtctccatctcattgactcgacgttcccactcggcctgttccatctccagcacctctttgccggcggcttcgttgcgcacttcttccagagcttcgccgacacgtctctccgcgtctgccactgcttgctttaggcttgcaacctcagcctcttttccgctgagagtggctttgagggaagatatgtcagacaagaatccggacttgagtgactccaattcacggggagtgaccgtgggaatggatcgaggggtaggcgcagccggaatatcaaagtccaaaagtgacgacatcttcccaggagatcgaatggattggcgcgccgatcgcataggcgaacgccgcgaagtagagaaacgggcactttgcatggactgacgagggaagaaattcatttgatcggtgaaatcaagcagattagcagagtcacctgggtgagccatatcacgtgggcctctgggtctcggcgtaggcgatcccgtaggcgaatttccatctatataggcactcgctctgtatgccctacgccctgtgcctggggtggtcggttcggcaatgtgtcgatgcccgtccatggtgggagctgggctgggagcgacacttcctcgcgttgatttcaccggcgactgggcgcgcagcttcgcaaatgtagtcatatcaggcatagcggaaaatgtgctcaagcaagtgtcatccattgagtcgtcgaccatcgaattctcgtgtgagatattctccttgtcgccatcttcatgaagtattgtgctcattccttcattgtgcctgtcctctatcatgctgttgccaattgctgatcggtcttgcacggcacttgcagcggaaaggacgctctgttcctggacactagggtcctcttcaacatctatgtggatcgctggtgcatctggtcggctcatcatacccttcttgtggcgctcgttcatctgtaaaacggcctctagatcttcaggtgtttggtcgtaagatcttttgcggggagttgcagcaactgggcgctggtcactcagtctaagtgatgcacgagaaattcggcgtgacttatgaagatcaagggtgttgtccttgggactcggccggaaggacgagttaagtactggagtaggggaagaagagttggatgctacctgtgacttcgcatgcgcatctaactttggggtatcaactgtctctggtgcttcgtcgcggacgggcgagttcggtgtcacaggtgaagaatatttagacactattggtgaatcttcttgcacatcatgtagttccgatggatcggctgtcatgttttttgcttcattgcggataggcgaactagagggatcgggtaatggccgcgattgaggaattggcgagtcactctgcatttcgcgcaagcgatcaaagtctaccgtctcttcccgcgcatcagggcggaatggggagctctccggatcttctagagctagccgccttcccaacccaggtgacataggctgaacctcgcgcaatttttgaaaccccactgtctcttcccggacatgaggacggaacggggaacttgcggggctctcctcctccaatggctcaagctctgggtatggcagaggagaagactgttgctcttcgtggatattttggaaattcactgtatcttcactggcattaggccggaagggagaactcattggctcctctacagccagccgcttgtccaagccagttgatatgggctgcagttcgcgcaacccccggaaaccaactgcaccctccgtcacatgtggacggaatggagagcttataggactctcctcctctagtggttcaagttgtgggtgtgattggggcgaggtctgtcgcatttcgcgttgcttctggaaatccacggtgtcttcgcgcccatcaaactgaaacggtgagctagcaccgtgttgatatgattcggcatcattgaaatcgtcattcgcgtgttcattttcgttctcgggttcgtgagggtagtaggtttcgtattcattatagccgttcggactcggggtagcgtgacttgtccatcctctcttcaatgggcttgagggagcaacattttccgagggctgatcaagggtcttgtgaaggaagggcgaagaattcgccatttgagattgtgcgcgcgcgttctggtaggaggatgagaggggcaagagtggatttgacattatcaaagccaagagaggccctcgagaacgagggtgaagattgttacaactgaatcgtgcgaataggtctctggtcttttttcagaactagttcgctggacaagaagagagcagagcaaggcagagtttgtgtagttatacaaaaagagttgcaaggttgccgtgttgacgttgctgggtaaacagagctagtctcaattgggaaatgtgcatcccaaactatctaatcggagtctcggactaggtatacaacacatatccctgtctttgacgacatagttcagttatatgaccagtttagctcatagtactagggatagaatataattgctacgcttcgatccgcaatcaagataccactccgatgtcttctttagatgtcttcctatatgtctttcaagcgtctttcaagattctttctagttgttatgttcttttatgtctccttacatattttttttagatagccttgctgtattggtataatatccagcagactattgaatacatgtagatagaaagcatgaccctacttggatgagtgtaacatacgagaaggacaatgccctagacgaagcctctgttgataatattaatgagatttatgattctactagtctagaactctagttctaaaaaagacccccattagaccctcgtttcctaatccgacaattacgcttctgtgtgcgcaccaccttcattgacaataatatgaacgatgtcgtcgtgtggctgctctggaagagcaacataatggcagacagccgctggctccacggttgctgatgaacgtttgtcgcgctggatgaaccacagctgtaaagcaccgaataatgcaacgagactactcccccaccaggcaagagcagtgcagccaatctcagctccagcactgtaaagcaagccagaaatcggaggcgcaaaagttcgagatgcagccccagcggaagcagcgaggccattgattttccccatgacggagtctgaggggctagcttgcttgatgagaatcaagaggaggggatagtcgataatggacaagatattgcgaacaattaaacaagcataaataccgacatagatgagttggcgcggcaaaaagaccaggaagggaaccatgaagtatgcaattggatggagcaccgtaacgatgacaaagagccgccagattcccaggtaatgtgccagcaaggggaaaatgatgctttggatcacgagggcaatgataccatcggtggacatgattacacccacagttcgagttgaaagaccgactccgcccgggatgtcaaagggcgagtggtgcgaaggtgatggccctcgggggtccttatcctgcaagaatatgggcaagagatggtcatatgtcatcgagtgataagtaaaaatagccaacgcaactacaagcataatgactcgccaggtacaagccttgggctttggtaatttctttgtcgcgggcgaggacccatcggcttgcacattccaactctcgtcattatgaaggtggacttggttaaaggtcccgtaagactccgctcgcaggtccacgccagcattggcggttgcaccagatgtaaccagaagcggctgctcagctgcctggtcgagatgtcgattggccttgccgggctgcatgtctggatgggtctcttgcaggaacagccagctaccgataatgctaaggagaagtaagacgcagcaaacaaggttgggcaaaaggtaggggaattttccaaagaggccatcggctgggaataaggatgggaagccttcagttggctttgctagcaagcctccaatggctgaatataattagcatttgcagtagaattctataatgggaagactatacatacctggaccgataatcgttccaattgaccaaacaaaaggcatgatggcatatgctcgagctggagacaagattaatccctgattccgctagatatgacataatagagatgtacttacgttcatgttctggtcgcttgacaagctcactaaccattgtttgaattactccaatgttcccattcagagctcctccaagggctcgaccggcgagggcgatccagaagttcggagccatcccaaccaggagcaaagaggccatagtaccgaaacttccagatataatgataggctttcggcctacgcggtccgaaagagcgccccagagcataccagtcaaggcctctgcgagcgaaaacgccgaaatcaaaataccggcatagaaggaggcattgttaccattggccatgtggaagtccttgaccatcacccacgagtaggggaagatagaagtcaaggcgataggctctgcgaccctgcatattgctgttatgttgtgtcagtcattgccaggtacaaacccgggatatggcatacctaggaggaaaagttgtgctgtgggaaagctgtctggcgacggatgtagtcttgactgtggtgtcaatgccatagttcttcagaagcagctaagatcttacggcaatccacccggcagtgtcgagttgatctctgcccgtaccttgtaccttataagcggaaggttttttttctttctctttctttctttctttccttctttttttaatatcccaagaatgccaatttcatttatctgagaatataggaggatcaaggtggggtgaggttgagaagtcggagaggggagaaccttggaaagatactttattttccacagccgagaacggacacaatctgatcctgacccctacctaaaggaatctggaactcttgatcctttacagatactctttcaaagagatatggatagagatagtttgaatattgtgttatactgtagtcttatctctccaaaaaaatctgagtggcgaaccatattttgttcgggtatctcggcaatggcccgtgatattgtattgttcaataatgattagttgtcgaattaataacagaatatagcataactaatgtaactatgacatatcaattatataatgttatatccagtaaacaacactgtagtctttcgatgttccccactctgctttcttatatcccagtcgaccaatcacaggccacataatcatttaagttagacctactccgtatagatcagccgcatatgtacttcacatgttataaatgattgaatataacgtcccttatatcatctaagccaaatggatcagtcagtaaaatgcgccgtcaatgacagaggaaccgcataagcggccggctattcaaggttatacttatgtccatagttgatagttgtatatgccgtgcctaccctggacatagatatattgaaagaaatcagaaatctcactattcatcgatctgaatgctaaacacaaagaatttctatccttgaccaaaaagtaagaaatgatgatatgaggggggaaaaaaaaccatgagcacagaaaaagataagtagagatgcgttcaccggtgaccaatcccctgcgccggctaatccacacatgtcatacggtccggattgtatctagataccaaataaagaaagccaaactggaaaaaagaaacaaaaaagaaacaaaatcaaaggattcacgaagtagcctctggatgcgtgggggaactagtgatttcgacagagcgggtctcaagttccttgggaagggttccagagtgatcatgagactccacatgagactcaacgataggcgtcgattcagagttcacttctaaaggctggtggaccgacggtgtggcacttgaggaagagccctctgtctgtagcttgttggaagtatcctcaacgtgttccgaagagtcttccactttctcctcatctccaataacagcagctagactgcggaaattgaacatcggctcaagagagttggtgtttccctctccagtaggaggaccacttgtgccatcctccggagtgatttccatgacagaggagagcgacgaagaagcgctggagacctgtcgcaggtgagattgtcgtgacggctcggacagatctgccgattggtttcctggtgctattggttcaagcagcgtaggggaattcgtttcttccgcggctgatggcaatgcacgatcaactcccttgcctttactagcagcagcgatttcttcaccaacgacatcttcgcctataacagaggatgagctactagtccccttaccaatactggactcgccgaggacatccaaagcggaggcgctagcattattgctgtacaagccagtcttgcgagccatcttatccgccttcttagcctctttctccctctccttctccctctttttggcctcctttcttaactccttctcctcccgtttgaggcgctcgtcttcactggccaagctcagtcggatagcttccatcatcatcatttcctcaagatcgtcgattcgattgcgtctcgagcttgatcgaggagcagccgggttgcccgctccctcttcggtagaagcagaatcggtgtcttgtgcagttgctcgaggtgtccgatcagcacccgtacgctccgtcaagaaagccaatgcattgagggcgggtgaagaggtccggccgtctccaccggtggctcttcgcattccgcgccgtccgatgccaaaaccccgtgactcactcccagatgcactggggttgatcaaatacgctgcagtgtggagggcggtcgctgccgcagatcgacgtgccgcgtgggctcgtgcattcgataatttggtggcccaatccggtcgaatcctatcagtcgtcaccacggtgggatcagtggcggatagcgaggttgcacggcggcgacctggaacggctgcggtggcggatgataaggaggaggtggaagataagggggaagtgaagttaggtgagagccgggccccggggtctgcagcataaatcaggccccgacggaatgagggtgatgaataggtgactccgaactccggctggacacagaagggacatgccgatggctccgagactaattgcgactcggtcgactcagcctgctctccctcagctgaaggagcattcgcgtggggctcgccatgctctggggggtgcgggtcagggcgcttgatctgcacgaagcattcggagcaaatgggttgatcgcagcatcgggtgtggtttaagtatggcggatagtagaggaaacagataggacactcgcttgcgtccttgtacaaattgacttcgatgggctgtccgttgacaaatgggtccttgggaagctgcagttcccggggcgttaaatctgtttgcgagttatgcttggtggtcaaagcagccaaggtcttcgcccttgttcggaaaagaggggaggtggatgtcccggatgcgatgggagatgcggagggtaatgattgaggggggttggaggactgcgaagcatctgaattaaaagattgcgatctggacgttatcggcactgtgagatgctggatatttgtcggatcggcagaggctttgtctgcggtcctggataaattgtgctccaactcgggcgggatctcatctggcaggggaatgggcatgcctcgggcagccgccataatctgatgctcagcccacgactccgagaagtcattaaggcctttccagaagggagccagtcgacgttcgatctaacccgcggtcagccttggctaaattgcatctagggggattccaagcaaacctaccatcagttggcgcaccactaccttattgtagtcttctgtccccacatatacgccctgcgttacaaggtagcctccatcgacatgctcctccttcatactgcgctccctctctttaagacgagccacccgttccttctccaagcggcggacctcacgctcttgttttgtctcccgccgattctccagcgtggccacttcacgatcatgactgctgccgattccaagaatcgaaaggtcgggcctactgcctcttgctgcacgagaaccttgatatggccggcttgagccatcggaagcgcccggggataattgacttcgacgacctgacggggctgtggagcgtgactccttagtctgggagtttcccatgttagagcccagatagatgtaataaggtggaaggatggcgagattgtcgggttcagccacgacagttccgacagtcacggtgataactccgggatatggcggaaagggcccccaaggggggttgtattgggggtgggcagtagaaatgggtgtaaagaagatggagaggtttaaaaaagttgaaaagaggctaatagagagagtggaggtaagaggagtaactttcagagcgggggggggtttgtgatctgtccggagtaactggggaaatgagatcggtgaagactttctaggacaacaacctccatgaggcccaaatgatatcaagaatatttacaaattcgagattgcaatattctgatattccaatagaaaagatagaaagatagaaataccggatgtggcggatgttatttttgttattttttaaatttttttcttggggcaagtatacctgtttgtctcatataatgcctaactagactagttatgggaattactacaaaaccacataacatgtatttatacatatctatagcatatgataggtaggataaacaggttaaatagcataaatatcaagctttttactaattctcaactcaagatcatcagttgatccatcgtcattgtcaagtcatgggcagatacactccacttccaccactattgatagtgcgatgtagacatcataggctctaagatgtagcaaaatgattgtagtatagatctcaaaatattacaattaactgtggaagtcaactagttagttaactactccgtacgtgcataactagttgattagttactggaggcaacaaggccaattcaggccaacacttaaggccaacatttgatcaacctcggaacaacctcagccaataaaatctacatacaaaaggcggtggcataaataagtctacattatttttttgccaaagaaaaaagatcgaagagcggtgttggaccaaagcttccacaaaattattttggaccttgacatcctgcataggccatgcagtagtgatagctctactcattctcactcctaccgagaatcctctggcaatgactgaaacgaccagactacatatcacgcctttcacccaggatatccttccgtctgtgctgccagcatctattcgcaacttggccacagacatatctttccacgagatttctacattcccagagaataactacggatacgtgactctgccaaacatggaagcggagaagatcaagaagaagttgaacggctcgatcctcaagggcaagaagttcaaagtcgaggcggcccgccctcaaaagagacaccgggaagaagaagatgtggtgcctgaagccccctctagtgccaagaagaagtccaagaagtccaagaaacaagcgcccgatgacggtgtaatggaaggctttgagcttcccgccgaccgcaaagtgaaacgaggttggacggagtccagtgatgctaagcaagaacgacgaaagtcggagaagaaggacaaaaaggacaaggaggagaaactgcaacccaagtccaagtacaccgacaaatccgaatgcctgttccgagcaacaatcccacccaaccgagcatccgacgcagcttccgatgataagaaggcaaagaagaagaagaagtcgaaggataatgtcatccacgaatttgagagaacggtgacccagccaagcttcctgcgcaccgcggaggaaagcgcagcgcctacggctacatttgaagatggaaaaggctgggtggattccaccgggaatctgaaagaacccgccagtgagaagatctcgaaggataactatcggcctggtcagatcccaggggctaaggagaagcgccgagctgccaaattggccaccaaagatacgaagaagcgttcgcgcaaagaaaagactccagaggaatcttccgagtctgaagattacacctcatcaagtggctcatcttcagacgagggcggtgactcagagagtgaggtcgatgagaacaaggcagatgaaatccccgaagattcatctgcatcctctgacgatgaggaggaggtcaagccgcaaccccaagaagagaccaccaagtctacagaggctaacgacggtgatgctgatacaccgagccagtcagactcggataagatacccacggaggctgcgcaagaagtgaaaaaagattcacctatcaaggaagtccacccccttgaagctcttttcaagcgacccgccccaacaacatccgataagccggcaaccgaggccgaggctggattcagcttcttcggtaatgacattgaatccgaggacgagtctcaaatggctgagccgcagacacctttcacacccttcacgaagaacgacctacaaaaccgaggtcagcgcagtgcagctcccacccccgatactactgcagccaatcgacacatgacgtggaacgagagtgaggactcggatgatgaggacatctcgatcgacagccctgtcaaaaaagctcgcgcggaagccggtgcaagcatggaggaaactgaattcgcaaagtggttctgggagaatcgtggtgagaacaatcgcgcctggaagaagaggcgacgcgatgctgctaaggaacagagacagagagacaaccggaagaagggaatcaaggcaaagtcatagattcaaaatatgtacctagatctgatgtggtgcttatacataaactatgctgctagtagccttcaaatgacacaaacactatgtaatttaagccaacgacgtttccaacgttggtcaaatctaaatataaaaaaacctcatggtctttgttggattgcgtacacagtcatgtgacccgcattcatcatcattaagctcatccaaactaggactcgtcgcatcgtccactacgtgcccaggatgttttcgacctggacctcacagcgcagcatacagctgttgttgctgcttttcacatttttgtctctcacgtcattggtagcagcatctagtaagtgctaggctctcttctccgatgcctcgaagcgccaagtcgaagatcgaattgctaccatcttcgcgtcgatatctatgtgatactaatactcaatgctaacagcaccaacctccttctgcaaatgcacctgtttctccaatagtacgatcatccccctcaatcctgccaagtccgaaagctcctccggcatcgaccacgtccgcttttacgagcgcgactctctcagctccgagcttgagcataccgatgaatacagcaaacgagccgagaaataccgatctctgaattgtaatgattgcaatcggaaattctgtctcgactacgagctaccaacatgcaaaggcgctaaggaggaagatgtgtatacgacttgcttccgtaagtgatttgtcggactagcgaatcagccaagagaaatcgaattggatactataacagatttgctgacggatctgcggtactagagcgagattcacggaaagacgaggcggtggtgtttatttttatttttgctaccggtggactgctggcttgggcagcctgcaagccatggattgagcgatatgtcgaggtaggtcgatgcaaagcgagatctgtgagaaacccgactaactgatttaggctgcacgagaacgcaggtcgtatatacccgttgctgaacccgatcgctaaatatgaaatgatttgatatgattttgaatgtacaattttgtaggctgaaatatctagcaaagagcgtataattccaagacttgagactaaattcatcaacatatacaacatacggagtagggatgatgccatggggaatttgagctcgatatgatatcagtaggaggaatgtactataagttcaggggtaaacacatcaacacttatcttagtatacctcactagtaacatactcgcataatctacttcgtactagttagtaagttgtggtagatagatctatttatttagctatttagcgcttctagattgctacagatccaatccccactacggactatctgaaacaggatagattgggggttatggccaaccaatagatccgatcagccagagagaatgtgatttaataggcattgggggatccttatatatgtgcacacattggatcggctaacaattgccaatcgagtggattcagagagaaaacttgtttaattaaattaaatccttttcttgcttttttttctctaatcttcctattcttctctccttaaattgctctctcttctttaagaggcccgatccccttcatatccatatcggaactggtggcgttgattttttttgtaatatccagcgatagtatatactggaattcaaaatatggctatcttcgactcagaaaagcgccctcgtggccttcgcgtgccctctctcgcagcattcaagtctttccagaagaaatcgtcggaatctgtgcccaccgagcctgtgccctccggggagtcaacttcgcctaaagcgacagccttccctacccctccaccaccgaagccggcgcccccgccgggcaaggacctcccagtgcccccgaaagaggaaattcccacaccgcagacctcaaccaacaacccatacttccctccgatcccctcccaaaatgcagtcccagaacgacgcccaattgaacgggtccccaatccaacgcagtctcctccccctcggatgacaggcctgcgaaacaagaaatcacagcccgatttccacgtaccccaacaacagacaacaaactatttcgcgccccaagctccggccgacgaggccaactcccccccgctggaagacttcatcccgaccccggacagcgccgaaccgccactaacagtgtctgaactgccacgcgatgagctgtccccttcgcccttcgtaccaccggatgttgaacccgtggcgccgaaattgaacgaaatccacctcacatgctaccagcaacaccgcgctatgcccgtagcgcagaatgcgtggtgtccgctgccgtgcatgacttgtcagaaatttgacattgagatccggcaccgttgtgtgttctgttgcctgcgcatctgcgagtcgtgctatcagactctgcaaaaatgcaagaatcgatccgtcgaagaactggtcgatcggctggtcgtctgatttgttgatatctcaaggtggtgttatggtcgtggtgcgttgacctgaatgacctcagcatatattgcatgatctcttgcgcaggaagtacagttcctgtaaggttgtcagctatgttttctatttttcttcttatctgtatacctttttttatgataccaagagctcgtgtatatattatgttttaatcaggaggaccgaagctgcatgttaatatgaatagatattctttttttggggggttccttgacataagtgtagcatttcgtagagatatctgagagtttggagaagctatgtgctaggtcagcttattgccgcgtcaagaatactcccatatggtacaaacgtttctgagagatcaatcgtgatcctcctcggtcagaccaggacacccttccagctcaagatccgtttcataggcatatttgcaccagaaacaataccgatatgtctcgcgcagaaagagaaccagcttgcgtaaccgctcagctggctctaacgcattgaaggcatcgagctcctcgtcgtcttcttccagctctatctccattgtggaggtattctgatccagttcactgccaagggcctttttatcctcccgatccatagtagggtcatcgtattctggtagccgtgctttggggaaaaatgaagaagggagtgaggattggagagcatggcgtgtctgacggtcactgtcgttcctttcccgctcacggatgagacctcggtatagaacgttgatttgcgacgtgagcttgattggcttcttctttgtcgcggctgcgttgggtccgtcgcgtgcttgactaggatctgcggagtcaccgccttctttgttggacttggctgaggaccctatttcttgttcttgatcttcgtcgatgatagccccactctccgattccgcatccagcctctctgcaactttctgcgcagcacgcacctgcgcttcgatgcgtctcaactcgcgctcttcacgaacgcggtctcggtaacttccttcctcgtgtttgattttctttactgcttcttctgcctcctcacggagcttgcgttttttttcagtgtccaacccgattccgccgcggttttctttcatggttaggttcagcggttcagcgcgcgcctttaggaaagaatcggtagtgacactgccagaatcgctcgctgcaggaggcttgccaagcaccccaccaggcttaaagccaagctttgccatcatttggaatcctttgttggtggggttgagggtacttgtggccaaggcttcctctcggcgggcggcttcccgagcagcgcgttcggctttcgatgggactcggcctcgagcttcggcctgcatgtggaaaagaatgttagaataggtttggaatctagccggagacagcgttgggctagaatgtgaaggatacggcacctctcgtagttcgcggcgctttttttgtgcgaaggtctccttttgagagggctcctcaatgaccatattcatgtagtcgtcttcatcttccgaggccattgtttcggttgccaagagtcaaggtatggcctagacgctaaagaaggggagagaggaagaggaagagatccgcaggcggacaaagaaaacgctttgggttttgcggggaactacggtggggctctgattaattaatttggaggctctgattatatacaacgctattacactattaatgtacactatataacatatattatgggattatagtacttaagaagaaatatatcaggtttagtagcattttcttcggtcttttatcggggaaaaatgtggaaattcggattaaaatcagctagttatatgttatagaccaaaacaaagacgctatttatgccaaggatcactgtctatctttgtttatatatttagactcgatggtttcagatgtttcccaacgtctcacttatgtttcttaccttaaagactatatagatatactgttgcttttgtaatgaaatacctcccaagagcatttaaaccatgattttcgttcctgttacttacttctgaggccaaatagcctgctcaccgctaaaattacatacctattatgtctattatggatggtgttcttccccgtaaagatcccttactgtacatgtgacacatccccgcaagcgtctgtttgcatatctcaatgaagcaacagtggcgcaagggctttgtctttgtatcactgtctaatagctgagttcggtgcattgtcaccgtgacttcgatagacaatgctcggcgttttctcttgtctccgcgggaccctttataagccatggcatcgaccggttgacaatcagactgtcagtcaccatggcgattttcttgtatatctgctctttgctatctctagcatctgcttctacggtggtagatctcggctatgctagctatgaaggtcgcacactatccaccggagtcacacagtggcttggcatgcgatttgctgctccccctgtaggtgatctgcgatttgctgccccgcaggatcctttgactgtgaagggaatacagcaagcaaccgaggtatacatctcttgtgttcggttatctataggtggctactgactattcactgctagcatggaagtatatgcatccccacagcagcaagcgaaggccggacagtcccagcaggaacatcagaagattgtctgttcctcgatatatatgctcccacagccgcagcaaaaggctcaagcaaactgcctgtctatttctttatccaaggaggaggctttgcacttaattcaaatgccaactataacggcactgggttgatcaaggcatccggaaacaatatggtcgtggtcactttcaactatcgggttggaccgtacggatttcttgccggagatgaggttgaaaaaggagccagtctgaacaatggtctgaaagaccaacgcaaggccttgaagtgggtccaggagcatatcagcaaagtaggtcaagccgtcattcctcatttttttttttcgtggctttgttgtttgatacctggttttgacactatcccagtttggcggagaccctaaacatgttgtcattggcggtgatagtgcaggtgctgcctcggtgactctcatgctctcggcgtatggtggcagagacgaaggcctgtttgttgccgcagctgcagagtcacagagctttgcccagatgctcaacgtcaccgaaagtcaatttgcatacgacgcgctggtaactgcaactgcatgtgacagtagtcaaaataccctggcatgtctgcgcaacctcgatgtcaatgctttgcagcagaagaacatcaacagaccatacccaggagcaaaggggaagccgttatacctgtatagccccacaatcgatgaggatctggtgccagactacacgtaccgcctcttccatgaaggcaaattcatcaaggtacctgtgatatttggcgatgacaccaacgaaggcacgaaattcgttcccaagagcacctccagtgtcgatgaagcagatacgttcatccagaaccaatttccagcaataacacaggcccaacttgccaagctcaacagtatatatcttactccaaaccagaaggagacattccctggcgctggggcctactggaggccggcaagcacggcgtacggcgaaatacgttacatctgtcccggaattgacttgtcttctatttacgcagcggcaggtgtcccaagctggaactaccactacgcagttcaggaccccgccaacgagagctcgggagtgggcacacatcacaccatcgaagtcaatgcgatctggggtccgaccaatactaaccaaaaagctccagcttcgtactacactaccaacgcacccatcgtgcctgtgatgcagggttactggacaagcttcattacgtctctagatccgaacaccaaacgtcttccttccagtccgaaatggcagacctgggaccaaggtggtgatgcatatcagcggattttcattcgaaccaacgagacgaagatggagacggtgtcacaagcacagagaagccgatgtgaatatttgactagcattggtcttgatttgaagcagtagcagtatatatacccctgggagtaaatgaatttgtgatctactgaggtcaggccttttaactaatcgaactcctactaaatgaccatgaactacttaggtacctctacatagtgtttttctatgccgggtgcgtatgtagttcaatctacgggatctttacagcaggagatcgatagtgcacctaagcactcgtgaatcagtgtcggtctccgctaaagtagacgaagaacaattcgaaagggctcttgtgcctagtccccacgacctattccaggcaattgaaatgcttgcatgcgacagcggtcacctgggaattaaagtccattccaaggttaacaccagaatgccctcaccaaaccaagattctgatggttccagggttccgcctagagatggaaccaagaagtgcttgtttgtttcgtttattcttttctttctattctctaaccttggaagtctcaatcagggagctcaacatggcctaccgagacaatatcgtcgtcagaggaacctaacacagtcttccctgctgactttccggtttgtaaccgcctgagatcatcaccagcctccgagaaatccaagagagtgacaggagaaggtggggagataatcccttccagatagaactgaagcgtgtctgctaacaaagtctgaatggtgggtggtcgaagtttcatcatcacgacaaggtcccctgctgcggaagtaaagccgccggtaaatggcttcatgtcaagtcgtccattgccatatatatcgcgttttttgagctctatgagcctccctaaaggcgcaatgcagctccatgagtgacgcaggagttcaccaccgagggagttcaaaacaacgtcaacgcctctttctcaacatctagaatgtccttttgttcaaggcactcaaggtccttgctttcagtctacccaatggcaggtagcacttctgtcaagagttcgatgacttgaatccacatgtgtaagaacgacgtccgtgaattgaatctgcattgttgaagatgacttgtcccaaaatgttatgtcgcttttcagtttcttcaaaaattcgagtgtagcattgtgacacagaaactcgtggctaggctcgctactgacatcagacgcaatctaaatttctcaacatatccatggatgccgggagatatacaaaccgtattgttcatacaacaatacaaactctattgttctgtgaataatataaaccctgttatttacggaacaatacaaatcctattgttcacagaacaatacaaaccttggtacctatccgccaacctctggggtataaacagggctctcatacttcttcttcttcttccctccccacccttccaggtttcttcaagtctttacactattcatcttctgctacaatcttcactctggtatatcacttcactttgtaccatcagttcactccagtacatcatcacttcttcactctggtttatcacttcactctcagtcgtcatcttcagtcatggacccctcagtgccgtctctagggccttcaggccttcctacacccccgctgtctcctcgaaaacgacgccgccaccttcgtgagtccgatgatgcagaaggtgacatgagtcttgagcagtacttgcagcgcgtcgaagtttaccgatcgaccagtatccccagtcggtttccttcgccagtaaaactggaggttctcccttctcttgagaaagtactcaggccactctaccctgaagtcagttcgatactgaaccaacacaatctgccggggatgatgatgtatcggtgttggaggatgaccaagccggggtatccccgtggtgacatccccgtcgatattttcagtgtcctccttgatacctcgactccaaacatctctcctcttggccctatcaaagacgagatcttgagcctcttccgtcgacacaaggtcagagtgcatgtcgaaatttcgaacgacaagctctgccaccacccgacatttttctctatcgccttaaaccaccctcttgtcaaagcatacgaccgagtcatgcagaatcttgtcgccatcctgaagcagacacttggttccaacttcaatatgctatgccccttcaacgttggtccgaatgaagccaaggcgcagccgaccattgtggtatttgtggagccatggacgattacaaactggtttgagctgcgacttcaagtcatgtctcgactcttgccacacatacaagcggacagctttgacatcgaatttttacccggcgccatgtcattcctgaatggaggcggcattccgttcacacacaacgtcaaagagcatgaggttccccgaatgggatcctcgatcggaattgaaggagacaaaaacgccggaacgcttggcgggtttgtgacattgactcacggtgatgtcgttcgtagaggttttttgaccaattaccacgtggtcaggccatcgccgtcccaacgcccctctgacagcaacgatttcctccaaagtctcgaccgtttcggctcctcccctgtgcgccctctggccaacaaaatcacgatggaatcgccatctggccttgataaagacgccaccgctgcccacatttccgagcgcttagaggcaatgcgcgaacacgagactgaactgaatgccaaggtgcaagagcgagagctactcggagctacaccaaatcccggaatcctggaggcgctttcaaacacaaaagattctattcaagaggcgttgcttctacgttcagtcgtcgaccgaatgccgttcagcctaggtgatgttcagtttgtgtcaggatatgaagtgcacggtggtcacgttatagactgggcattcgttcagatgtctaaagccgccgagccaaagttcttcaggccaaattttatgccatcggtccctaagaagtaccagccagagaaatggagcccgtctcaaaattctgcaatctggctaggaaagaaacctctcagtgagtttgggtcacttaaagatggggattggtgttgcaaaaaaggtcgtacttctggctttactgcaggtgtagtgaacggccccaaagcatactgcaagtggaatggccctgaagtaagatatactccgagcggacaaaaagttgaaatgcgtgctcttgaaactcaagagttcgtcattgtgggcaaaagagctggggtaaatgaggaatcgttctgcacggacggggactctggttcattcgttctcggcgagagtggagaggtcaagggtttgctgtgggggggtatggagaaagacaaatggaatttggggctagcatcaagcatgcctgatgtcatggcttcgatccaggagaagatgggagggtccgttacattgagccttccggcttgactcattgatctttcaaatctgtggacatttgcttccaaggttctgtgcttattgaactctagttgcattgcttcgttgaaccccattgcgtttttatagcttcatttgacgtccagtaccatgtgccctgacataggacgtatatttatacccgagatccgtactcttgtaggtatactgtatacctgggctggtcatagaagcaaagtggcaaatcattatatgcgatcaagattgccgtcgaaggagaccgacggagcaacaaataaaaagaatctaaacaacaaaatatctattttttagcactcagatggaaagggaaggccaagaagtggcagaggaaatccgctatctaggtagcggattttgtagatactgtagatcttgatgaacttgacttttattcccacccttacgccggatgaataatgatatatataccagcccaacaggatgtacaaccatgtgtgatatatgaaaaacagatgtggaacataagttgaaatgcaagattacttcctgccacgcgcccgctcgtactcgttggcagcacggccctcctggctctgaatctccgcaaccagacgcttgtacttcttctcgtactcggaatcgcgctctttcttttcgcgcagctgctcgcgagcaacgaagctggcgtccttgcgaagctcgcgcatggcacccttgcgctcgcgcttgaactccttcttgagacggttggactcggcacgctcgcggtctggatcgtagtgcttgtctgggttgaagttctcctcgaacttcggaatggctgttttgatggccaagggtttgtggtcgtgcaaaaacagcggacgacgaacaagacgagcttgtgcgaggtgggaatcgatcttgttcagggtgctctggatgggttcccgggctgctgagtataccttgcctctgagggattggtggaggtgctgcagaacggcacggaccggtgtgaagatctcggtgaaagcagatttctcggcccaaatatcggaagcggagccaaggagagacacgagagtagcgaggagggagatcttaagctcctcctgcgcctggggatcagaaggagaagtggtcacgtcgcggaattgcagcttgcgaggtgtcaccttcttggagggcacgagctgaacagattcctgtgactttctgtaggggaaagctccaaacttgacagtcggttccgtgggagcaatattgcagagagcatttagagtgtagttgataaactcgggcatatatctcttcgaggttttttgatattggagacaaagactcgcggcatatgtaccacttgcaaggtctgtgagcgaggcggtggtgcactgacccaggtaacgcgctaggcatagatgagcgggtgtggctgtcgtatggaagtgatcagatgtggggaagaaggtcgagaggccggtaagcaagatgaggtcgccgggtaatagattgagtgggcgttccttgccaatctcacgaagttgggctcggcacgcaattgtcacattcaaaggatgggtcttagccaaagaatgaatgtgacggatgatactctccagaatggcaaatggaggttgctcagtctcgttacccatgtaagaaacatgctcgacaagaacttcagcaaatcgaccaagcttgtccttgtttccaggcctaagccgtggatggtgcaatgctcgaatgcgctggataacagtcgggatttcctcgacaggtacgttttttgtgatactcaggaagctctcatggtcttttggacaaggatacgtgaatgcgagctttccgtttgcttccttgttaatctcggcagcagtcgaagccgcagcggaatcttctgtcggcagcgtcattccgttgatgagctcgtcctccccatctggcccgtcagactcatcgctcgacgaagcctcctcatctccttccatgtcactgtcacccatgtcgaggctggcattcgaatctgtctcgactagatcttcgtcgatgatgaaatcatcttcatcttcgacgccaagttcagggcgtgtttcgctagggtaagctggaaggccgaaatgcgtagcatcgtcaatttccgactcgtcatcatcgggaatttcgtcctgatccatactgtcctcttcgtcgtcagtgagctgctctccacgcattcgtcggaggcgatcgttctcaagtttcttgagccgctcagcctcttcctccaccttctcctcttcggtcttcgtgcgatctgtgggtcttgatcgttgatcgaatgtcatctgtctaaggcgctgatcgtattccttctctggatccttgctattttgcgactcttctagcatagcagcacgctctgggttcatctctgagaaatcctgtctgggtgcctctgccttggtcgccttggctgcaggcttgatgccccgcagagcctcgaaaagatcaggaagttccttatccaatgcttcccgtaggtcttcatcatcatctttggtctgttgccgttccgctttgtagaacttagacttggcaatgacttctttcatgacctcggccttagtctttttgcgccctggctgttcttcgtctccatagtcaatgaagtcctcatgatcctgatccggatccgcatcctggttttcatcaccatcgggaaatcgcttccgtttccgcgacgtttcctcgtcggattccgcgtcatccaagtctccggcctcgaagtcgtcttggttcgctccatcgaacgacaaagattgacccatgtgagtaagctgcatctcatcatcatcatcctcgaggttgaacatggactccttccgcatctttctctggctctctctcgcaaatctctcggcggcccgttcctcgggtgtcatggtgggatcattctcaccgaaccggcgatcgatgagtccaccgatcttgtttcggctgttcatctctttcagaagagtggcgcgtcgctaactaaagttagctttataatcgcaatgctcaaggaaagcagataaacctactctttcttcacctagtgatttagtaacacctgggcgagcgccacctccagcggtcgtgttaccgtctctggttgtgacagcaaacttgctggatttgtttatcgtcttgatctcgaaagggttgaatcgatctcgaatggcttgcaaggcgacctcgcgctggttgcgattcttcgcaccgactccggtctttgcattttgtcgtttttctttcttggacttctgaggaccaagaactccgttttcacggagagaagccttcagctgtttgagctgagaaggcggcattttgtgtgattgggtttgaattcgagagttgggagtttttttccccgtcgtgattcccatcaaaaaaatcaggtacaccgcctccgcggtcttcgtcgatcaatattctgccgattatgttctccgcatctctccaactctcacaaccggtatggctcccttttctggggatggtgtgctatggctatgcctaggtatggcgcatttgtccgaggaagcgattttggctcagacgattaacttacctaggcgtctcattgttctttgccatacgcggtatcgctacagacctccgtcaagtcgttgacctgacagaaatcaaacaaactgagaaggaagacaagattattagcgagggaacagaagaaggtgcgcagatatttatatctaatgcattactgtactaataaatcctatagctctcaagttagacaccctcttgaagctttctcaaagcacgagccatgacctccgagctgcgtacgctaaaacaacgttattttgaactctgtgcgtcagctaatactacacagggcgctgcgcatcatttcagagcgttctaccaagggagatactcgtgatttgctattggaggaactagcgtccaagaacaaagttcaccaacggcgagctctgaatgcattgaacttcttggtttctaaccgggcccgtatgcttcccaatatgcatcattttgacagtatatagatgctcatactatcttccagtcactcgaacctcgatttgcactcgactcgccgacgtacccacctttaccgccattatcaactgcctttgcaacctactagaagaacacgtggagaagacatcaacgaccaattcgcctatttttccaaagacacggccgatgggagaaaagaaggcgctgaacattttgaatgtcttgttgccagagaacatacccgacgcattggaggcggggatcatcagccgatggctctgcagatatccattcccgtgtgcaacagccgagccttctcgccggcgggatgtggtgatcctcatgaaaacatggtggtcggatgatgtagtcatgagcgcgattttcagtgcgctttcctcgcacccggatggaatcaagcagctgcggaaacatggactgatgggcagcatgatcgaggagaatgaccaggacgatgaggatgatgcggacagtgatgtgtggatggtagacgcggatgaggcaggaggatcttttggacgatctcgttcgcgtagacagcaggaggggagtgccgaagagcaagcgcttcgccgacgcaggagagaagctatggttttgagcgacggtggacggccaattggaaatggagacataatccaacgacctgttgattatttatgatcttcaatttgtctgcaacactacgcaaccaaccgactctcaaaactagctttccagctactgtactttatgtccatgataccccacgcaagaaatatgatatgccatgaattttctttgaacctcaatataatactaaagccccatccacgctgatttggctaagtggtcggtcttcttccgactgttcttgataacaccgaacgccttcaattctgatagagcgccatagaacaaagacattacaactcggtcatcgcagccatcagcctcttcggtttcaaagacaccatagaaagcctgccagagatcatgaacattcaccagagcgcccgaatcaaggtacaattgataaagtatcgcggtggcaggttgcttggccgagacctttgtcatagtggcatccgacgaggaaagcaggtaatcaaagggagtagccagggcgcgctcgattgcaaagcgcggcctgggggcgaatgtttcctttaatggattccgcagatcaaacaagaaggcttcatgtagaaacagatcttgtgggttgataagggtttctgtgagatatacttgcaaaagagcaaccagtcggtcgacgatgttggtatattccacagcttgttccgatagatcggcttggcctttgcttagccggatacgctgctggacgacagtggttcttgtgacggtgctgttgatattgtatccactgcgcagtggaccggactccgggcacgtttccaatagagtcttgagatcttcttgaatcgcatcggcttctcgactaattaatatccctctgagacgcacgagaagttcatccagcttatcagaatctagggttttggctgcggccaccatttcttccacaatagtggactcagacagttcgccagagagtgcgcgaacagaaaggtccggcacagtagtctttttcgcgctctgtgtgtgttcaagacagacatatatgacacggactgcctggaacatgcctcgcattctttgctggtttgcatccaggtacttgggcgtctcttgaataagatattcgtcatcctctagcaaatctcggatttgcttgatagagccttcttcgactagatcctcacagaaccttgaatcatattagttgagatataacctgggaattggagaatcttacatccggaatgatggcaggtttctgacggcctcacatagcttgttttgggcgagaaccgtagaatctgggttggctaatagtaccgacagaggatttgcaaagaaatgagacatgtatgcatactgcacgaattagatttctgttttaaagccattgggatagttctcaccttgaccatgcggctgaatgcctccggactttgaaaatagtcacttgtgttttcaaacagagtattggtaacgttgcgacccagccatagattggtgcctgagtcggtctgcagagtctcatagatgcggtcgacacagttcccggcctcttggacctcgaaatgcttcccttgaaggagagcaacgcacgagcgaggcagtctgccttcgaacagctctacagaggtagagatgcctaatagaaccgtgaacggtatacggtcaagccatgatctagtagaaggtcagttgggagatcgaccgaagtctggaatgtcaatcgcacttgaatagagacagaagatcagtcaaaaggccagggtcaaaagcctcgctatctcgaagcgctaggaccaatttcttggtcccctttctctgcacatagtcgtgaagaagatctagatcgtaaccgagaagtcgagggccctggtgaatggttagtacaataatgcgatgtttttgattcgacatacagcacgatctgtaaggaacttttgatatccatcattgccatcggtgtttgtaaccgcagctcggatgatgttcttcaacgttgttttcagattgggagcatcgcctgattccaataccacgacgctgccttcttcggtcgatatcaattgaccattaagccgtgatagcaatctgctaagcgaggaaacatttgatccaactgtcaccaaagctgtaggaatacatccatcacatctaaaaccctagttagagcacgttcgtggatcgcatcgggatagggacgtacgtctgaggtgaggtgtttctgacaaaggacaacacatccgccaaaactgctgaatcgacatcctcgaggatattctaaactcccggtgagcaatatatcactatcggtcttaattaatttgcccgactgacctggatcttgttttcttgctttgaccaaagctcctgatacgtatcatatcgcaattggacggactcggcgttctcgtctccgtttaaaaggggcacaaagcgctgttgatcagcctggtcatctcttccggtagttgacgagactttgcggcgctttgaaggtcgttcgcctgctgattttccgtgtttgggtggttggtagatgtacgaaccctgggatgatttgtgagcgcgcaatcccaagaataccatgccagatccgaaaacaaaccaggttttggggcttgtcatttgacaagcctaaggcatcgttcaatccatcagcatccatactgctgctcgaaagggcttggttgtcgcaatggggatgacttcaagggcggaagcgcgacaaacgctaaacctaattaggcgataattggttctcttccgaacttgaacttcttcacttctccaacttttctggtcgcattcgatgaccgattgacttcagacttcagacttcatgctgcgccaggctattcaaggagcccgatggtgtcagcatgtggcccgcagcccatcgacacgcgctccacgccggaccttctccgccgtagctccgcggcgtcttaattttggcggaccgaacgacaaagtcacattctacgaacaagaatcccccgaaagcaaaacacgtcgaaaaatcgaccccgaagccgaacagaatgaggaacgagatgaggtcaaaaaggagctcgctaagatccaggatgaattgaaggtcttggaggagggaccttttgctcccaacagccctttcatcaagagtttgccagaaaaggaaaggaagattgctctagaagctctgaaaaaatatgacgaggaaaatcccgagccagcagaagaggccgggttggagcaagtttttgacaaagagcttgatgatatgctacgagaggagtttgaaggcctcgcgatggaagaagagaactgggaggatggcgtcaaaaatcggcgaaaaatagctgccagacgatctgccgcagcaaagcgtgcaggagcagaagctcatccttacgttataaagttcaataattctctacgactactccaagaaaagatgtcagacgagcgggctcgacaggacttatggaagtggtaccgacgatgcaagcagaccatcccagggtttttgacaataatgcctgagagggcactcgaaacaatatgggattcacaagcaataggagagtctgaccaggctacacgctcaaaacatttgcaaatcctggccaaggacgctacatctatcggccaagaactggctacgcctcagatcctgttttatattacatctctgcataaaagtggctccaccagccttgcactagagcaatgggaggcatatcaagcggagttgtctcagaagaaggaggatctggaagagtactggaagctcggagtgcgattatttgctgcagataacaacccacaacgagctcaagatattgctttggctttcctggcaaacgaccgaactcgtcagccgcgtgtactcattcctgtcatcacagcatggggaaggctgcccggaaaggaagctgaggtaaaggcttgggcactttatctgcggctgaagacattcctgggctctgatatgaccatggaagactatgatgaaatcagcattgctcttctcacggctggtcgattggatactgctgttgcaatcttcaaggatatgatggtgacaggaaaagacccggccaatgactcaactgctttgtacaaagccgcattgggcctggcgggtaaccttcatgcatcgagcatcaatgaaaatgaagtaaacaaggtctctttgtcggcactcaaggtgttacctcgccagttccaaaaccggttcttctatgcaagttggatgaaaaagctcattggtatgggtgaggtcgactctgctgctctggtgattgaacttatgtatgagcgatgtgtcaagcctgatagcaagcacttgaacggaatcattgccggctggctccgtgatgggaacacgagtgcacgcgacaaggcagagcgacttgggtgggccatgattcagaagcgtatcgatgttgtatggagacgatacctaccagccgagagttccccccggcttcaagtcaagtatgaggagacagaatctgtacgcatgcctcggtttatgcagagagaggtcccacctgcgagcatcgagaccttctctatccttcttcttcattacacacgccgaggcgacgacgacatggtcaaatacttggtcaagtctcttagtgatgcacacatcaagccgaactcttacttcatgaaccaccttctatacgcagagctccgaaagcaagacgtgaaaaaactctggaccaagttccaaacaatgtctaccgccatccggcccgacgtggaaacatatgcctgcctctgggactgtgccaagctccaatacgaccgtggacgtactgctttcgatgcggacttcccatcagcacgccaactctatgccaatatgatgtcctggtactcccaattatctcctcgcactcagaaaaccacccgagcgcagattcctagagctctatttgatcagattgtgcgatgtttctgtctctctaaagacgtccccggcacattagtggtcatacactcgatgcattcagccttcggcttcgcacctgatgacaccaccgcgcgcatgatagtacttcaaattgcgcgactggctggtgtaccagctgacactcccaaacggcgcctccgccgcttgtcttcgacgccacgaagcaaagaaaatatcagccaggttagccgtttgctcgaactgttgggtaaccgcaaagccgaaaacctgcgattgcaaggattgagtcttgagcagctagatccacgtgagatggaacaataccaactagagatcatggcaagtctactacggatcgtgatgagccgagcagatgccttggacccagttcaagtcgaaaataaactcgagatagcggcgaaggagatgttggccgaacatatcgatctggggctgcccttaggggtagaggatagcaagcttttgtgacaatgtcagtagcctatcctttttggcttatccattgcattggatttactgagaaatcaaggcgtttgacggtttgttttgctcttagattagggctgtatattattttgtacttagacataatgtacttatatcgctgaggtctaccatctttcctctgctcctctccacaaatgattttccttttccttctctctctttcttgctagctcagctcacttgatggagtttttgccttttcgccttctctagaaactttttaacactcggcaattgtcgcaccaactgtcctaccaaagtcttgaaattgactctgatatatctcctgcttgctattgattatctccatgcagaagctggtattatccacgccggtatgatatttctagacccattttcacttcttattcgtcctcctaacgcgttccctctagacatacaagaaaaaaacattatgctcgggattgaagatccttcaatcttagctgatttcgaagaggcggagaaatccaatcctagtccccgggagatcattgaagatcgagtgatttatttatctcacaagctcaagaaaacaaaccagcatgaccgacctgttttatgcgactttagccaggctcctttggatcagcccgttactcaggtgatataaaaccatatatataccaggcccccgaagttttactacgaatgtcttgggatcaaagggttgatatttggaatatcggggttgtagtaaggagggcatattttggtgtacttaccaatcctctaactgtcaacaatctaattacctcaggtctaggacttttccaaaaaggacatctattttacgctcgagattcacagaagcaagattcggacgctaatcatatcgctgagatgattgcgcttcttggaccaccgccaagagagatgatacagaacagtgactatgctacagacttctttgatattgaaggtacgtcactagaataatacaggcctctagggctcccggtcctgactgaagatcaaggcagttggaagggcaccgttccaatttcccttaagaactttggagcaccttgagggaaatctagaaggtgaacagcagcaactctttcttaaattcatgcgcaagatgcttcggtggcgactagaggaaagatgttccgcaagagatttattgtcagatcagtggctaaggtcgctataattagtcttaatagccccgttcgttgtatatttgaccggaacaggagtactttgataggttttctaagtcttcagcctcaccaataactggtatactaaaaatgtaatttctcttgtgaaaccgtagtccaaaaacctctaacaagagtgtattttgaaccaaaaagtacaataacaggaaaaacgactcatatctattttttgcccttgcccttcttcttctttgcgcttgccggagaagcaggcgtactcgaggtttccgcctccacaagaacagcatcgtcatcactgccctgaatagaggcaccggcggcaggggccgtagatgcggcctcagaggacttggttgtgatgttggtagtcttagcctcgtcagtagatgctactgagccctcattcaactccttcatgaatccctcttggatactcgtcttcttcttgatccaccactggcgctcctcttccaattttttctgttgatcgtccatgcgcttgcggtaaatatcgttattcatcatttcgttggcggactggaagatagtctggccccagccggggacataggcgtttgcctgtttgattttgtttagtaaagcacaaaacatatacaaccatttgttcgccgagaagaaaaaatgtttcttggcgacagagaacggagtttgcttatcatacctctgaaaccacatccttgacctcatcttccatctccttctccgcgcgctggaatcgctgccagagatcatcgccgacactaccacgttggacgagcgttgtgagagcttgcttctgggtgcgcagtgccataatgcgacggatgtcttcagctgcgcgacggagaagagaagccttgaagatagagtcagggatagcgggggccttcttctcttttgtggaagttgttgagggttcaaggtggaggagagagaagtagatatcacgctggaggtgggcagggaaccatggctctagagatgctgccttgtctataaattattcacaaatcatatattagccttggggacaattggacacgtcggcgcacgagatggtcggagaggctgagaggttgaggctttctaggggtatttcacatacgggacttgcgcttgcggtagagggaggagaatgtggcaagcgatcccaagagaatgcctaggtaggcgactgggacggcgagactgagccagtccacgtcgaacattgcgacgatgtggtttttcgggcaggggtatatggagagatcggaggtccgggaaagaaaatgaaataaagatggtcaagctgtcattcccaagtgtgaaggtgaaatcaagaaaagaaagggccttgaagtgcaaatgtggtggtcaacaagctcgaaaggccagggtgtttagtgggtcacgtcacatgttcactccttcgaacctacttccatgatagttataactagttcgggctgattatagatgtagatgtacaacttactacatatgtggctagagtggttcaggctgcgtttttttactatagcgatactataataaatgacactcataacgaaagattcgtgccaggagagacttgtgatattaaattctatgtaggcttccgcaaagcccaactttgggcctggatgccgggcctaaagtctaacccccggcctatcgtaggcctattaggcccccattaggcccctacgaaagcctattcttatcttaaatgttatacttgtgtagtatctataaagtctgggaacaatgccacccggtcatactttcaaatgaactagaaagaggtcagaaacagtttaaaaaaaaacatgaagagggcgtttcgtgggctgggcgcaaaaagagtatagatatactagttatgttacaagcacggagttacataatacaccccagtaatgatatttgaactccaattccatacaaatagacgaaatagtagacagacatcacggaactggtgtgggagcgattctgacctcaacggcgccgtcatctggcagaagtaggtcgtcccctgccgctggttccctccggtcaacataccgaagaccattccatccactcttgctatccaagcaccatagtctccggcttctgcgaaatgttgtgggttcctaactcgggacattccgagccaattgatgacaaaatggtacccatgtccctgtttacttttgagccgatcaagctcgacagattccaagctgtaaagcacagaagatgttagaccagtagatcgcccggacttggaaagtcccaacccgtcgtgggtatcgaggattaaaccactatgatatggacgatcgatcatgtcgctgctattgttattgctgtaccggaacccctaaagctcatgaattagcctgagaaaagacatagataacatcgaacttgatatgttgccagagacctcatcagcatgcatttttcggtggattctattgctcgacatttcaatcagagcccagtcagcggccactcgacgcttgtcctcattgagtcggatgcgatacataccacttccggcgacgacatgtcctaggtagtatgctccattctggcattttcgcatatgaatcccggttcttttcaaggtgttaaatatcccgcagcgtagcctcgtacgcacgcctggcagaatccggtaaccagcaaccttcccctttgtccatctcggccttcgaggtatagaaagaagcatctttcacatcttcaatggacgaatttagcgcttttatcatggtcctgagatctcgagatgctgggtggtcgattcggagaatgcgcttggcgatatcaaggaaaaaattgttgttgtgcataccagtccaagccaacccaaaggcctccagcgcggagtgttgactttagaacccccattttatcgatgataacgggaccattgaacggtgaaaaggtggatgattttgagcagaagtccattgaatgagcgcttacttgcgagaaggaagatatggttgcaactgacgacatgatgaaaatgaccacgatatcagtcgagggaggagggttgggaagcggaaggttccgatccgaaattagcataaataaagtataactagttcgaggagcggtcttatctataacgatctaagtgtcctaccgtatctgtactttctacttataaagagaatcaccatttatatggtttacagaaagtcctcgtactagacgagtagaacccgtaggtagtttttcttttcctttctcctgggtatttattatctaatgactgctctaaaaactgttctaaaaatggtatagatactaaagagcgattccttctataactagaaagtacggacagagtaggtacgatagaggtataaatacctcctagattgtgaggtactagaagaaagagtacatttaactaataacaaagataaagaaaaaaagaagaagtaagttgcaaagtgggaagcagctactagttaatatagctgactactttataaacgttgcaaactttgtatcgttgtctgaagtacaacatttacaacagtgtacctattattccttcaaatatatatctcgttgtactccggaatatgaagtagggatttgggatatatcaaatcaaggctagctatgcaaagcgccccccccttccctattactggcttattggctcacttctagcctacaacacaacaagttggatgatttcactcaagtggtagaaagttaccgcttggagatcttttctgtggaaaaacgtgctccgtagtttccgcctgtaacgctgttggcgccattgatcccaagtccaacggcgtttggaaagccaacaatggatttcaacacttgtcaccgcattctttcctacgcatttgagtccataagaaaacaaccggcacgtggcatgtacacgaggttatgcttcgcttcgctccggccattctcaatacgacctataagagctacaattacgaagagaaaccacgttttgaaccattattttcatagtctacatgtttcccatgtgaaataacacgctgaaactaatttttgcgtaaacaatgagagagattgggcaattcacacatttgctccccatccaccacaaaggaaaaaaaaaaaaaaagaaaaaccatcgccagatcagaggggaatatgaaccgagtcaacatattgacaaagtaagaaaaaggacaaaaaagaaaagggtgaaagtatggagtctctatcagacatcactaaaactcaggttggccaagatatccttggtctgttggctgataggtccgatctcctgcatcgcctgcatgtcttccaggactgtattgtatgttttgccgagaccatcggcgacgcgagtacggttccattctccacgcatatgccacacatagtccattagattggtgttgatttgctccagctgctccactgagaatccgctagttgacagggttagctgcgtgtgcagacgctcaacaacttcaagatcaagaacgaatggttcatggggttcttcgttcaggatcaattgcaagctagccgaagcattggttgctggcatgttggatgcatcgaacagcgggggttgcggtttcgactgcgactggcttccattcaacccgctattctcttgggtatctgcattgctaagcagcgagtcccgggggtggggagaaggctggctgctgtcattttgctgggtgtcgggcagatggtcttcctgtgacacgcgatcggggtatggagtaagatcggggtattcggttcttgagacatgagggctctgagtgtggtagttttgattcgacagatgctcagaggatttcttatcagaagtcgtctgggtggtggatgcttcattagtgtaatcagctggctgggatccgggggccattggagtcatggggcctcgctgagagaagctggaaagaccagattctcgacggatctgctgagaaggcgcagtgtgggaataagggggcttgggctgtgctgatggcccaaacgagcttccctgggtatccttgctacccgagtggtcatcagaattggacatgaaaatgtcgccgtctccatctccatgggtaccattgctcgcgccgacagcatgggaaccaaactcgttgagatccgaaccatcgccgtgatgacttccatttgcgaaactcttggacgggggtgcgggcgtaacagggcgcgaagtcgctttcccaacatcctcattgtccccgacgggttgaattgggccagtcgataggctggattcagtcgtgccgtgcgacacaataataggctcaggaatggggggaggggcattctccatctgagcacgtttgccacgctccgcggcctccttttcacgagccatctcacgcaggtagacctgctcacattctgccataagagctggttcggctaccataacactagcgatatcaacttcgacattagtcaaaagttcacttgaccgcaagatgcgttccgggtcaccagtctgtcgagcatctttgaccattcgcttgatatccgccacaaagtcgacggcgcgtttgtagtatccgtttgcaaggcgtttttcaattgtcacaatctctaggttgtagtagaacttcccagtggcagtttcacggagacccaacacaccatgcttgtcatatgccttctcataaggccgaaaggtatcttgctgatccggtggaagatcactggtaacaatgttgggattttcttcctcccacaagtatcggatttgggattcatcgatcacgcccgacctaaaacgcttgtacctcttgacttgatccataataggctgaattcgagttttcagaagattcaaggatatgtaatctttcttcctctgagccttgatctcctccttggtgagttctgcctcgggcttgggaggcggaggtggcgcgatttccaatttctccagctgacgaagtttgcggttttctggattcgggaagcccttcggaggtgtcttgacgaattcaatgatttttccaaagaattcacgacgcgcatcatgagttggagcagatagatcatacaggttcttctttgaaaacccgaacatgctctttattagactatcatccacttcctcttcttgtgattcaagaatgccaagcaaaagaactgggtcagaaggcggcaccgaccgcaaaagactcatgaaagtagaaatcacagtaggtccgacagtctggaaccacagttgaatattgggaatgtaaatcacactcggcttgtgtcgcttgacctccgtgaatagctggatgacagctgcctcgggagagcgggttgagtcactcagcaaggttgggagatcgaaggcctgtacatgcaggccctcaaacacatgcagcagcgcggcggcgaggtattgctggcccattccgtgagggcctcgaaggaggagtcggggtcggaagacacgcgagcgatcaaactcctgaagaaggagctcgcgggtgaagcctgcaccatcatcaggctcctcatattgagcctcctcgagagcagtaagcttctttcgctgtggaagtatctcggagagcaaagacttgatttcaaataatggacgacgaagcaggggttcaatgcttggggggagggcactcgcaccagatgaggtagaccgctctgaagagggcaccatcttcttgattgctagcatgaaatctttgggggcgacatcgattgttttcggatcaatcacgagctttttgtctgatttgtagatttgagggtatcttctttgtacagcattgattgcagcctcagtgcaaagggctcgtaagtcagccccgccataacccttggtcatatccgccagatcatctttgatattgcttggaaggggaggatcccattccttggtgtgaatgtcgagaatagcacggcgtgcttcgagattaggcagcgaaaaataaaattcacggtcaaaacgaccagggcggcgaagagcaggatcaacagagtcaggtcgattggtggcaccgatgacaaccacctgaccacgaccatccatgccatccatcaatgcaagtaaggtcgagacaatcgaggcatggatttgttcttgtttgctcgatctcacgggagccaaacctaatatagaatattagctattgtcaactatgctcagaatggcctctcttaccgtcaatctcatcaaagaagatgatactaggctggttcttgcgagcttcttcgaaaagaagccgaagttgtcgctcggcctcaccgacccatttgcttaatgcatccgcaccctttctcatgtaaaaagttaccttgcgtccttctgagctgacactgttggctagagcccgagccatgagcgtctttccggtaccaggaggaccgtggaatagaacaccgcgaggaggggtaattttgaaacgctggaatatttccgggtacagcagcggcaaagaaaccatttctttcaactggtcaatgtgcccttgcaaaccacccacatggtcaaagttgacattcatgtcaacccccaggggatccgcgtcagctaaagcttgcttgttattgaacttgccaaggtttgcaggcgtgccggatgaggtctgagcaggatcagccgactggttgtgggtggctgcaactccaacaccaggagcacgattcggctgtggggcaccttcgtcatcactgctatcgctgtctgcgcctccaactgcagtagggccaccaggaacaccgagaatcgctgaattaccaccgccaccgaatgggcctaatgtggagaacaaagtacgctgccagcctccacctccacgaccacgccgggatggagaccctgtcacttcatggtcagtgtcttcattaggttgaaacatttcaggtcgaatgatgcgataatcaacgtcctttcggttgcgacgcggtttctcatacacgaccgcttgcttcgcacggcgacgggcacggccagtaaggtcttccaattcttcggcgagttcctctgcctcctctgagggcgcacgggttcgagaaggccgttggcgtaggccaggacgccgactggcagagctatcctccgcttcctcgcgagcttgaatttctttacgaggagaggcacgcgattcagggtccgagtcttcctcttcatcattggatggctcctcctctggctcgaaatcactttcttcatttttgcttttccgctgtgagcttcgagacggctgcttacggctggaccgacgtaggtgcgattcttcatttgtcgccgcgccttgcgcggtattctcctcaagagattgctcgtggtggagcctgcctcgttgccgagttgttggaggttcatcagtctgctcggaatgatcattcttcgaatcgccattttctgattcaggaacaacatcttcatccggcattactttctcaattgggtcgtgatctccatcattcagtggcaatgtatcaccttcagcgccgccttgaggcacgtcactttccagtacctccatttgtgagccctgaatagttgtttcattgatgatttcctcagtgtcctcatcaccttcagcatcctcatctccttcggcgtcttcatcttcatcgtcttcatcaatgatcgtgcgcttggccatgcggccaactctggaaacacggcgagttggggatgggttttcggcttctggagtatgtgtacctcgctcaacagtgtgcatatgacgaccagagttggtaagggcgtagatatcctctgaggcgtcacgagtacggcgggttacacgtttagtgaaggccaagtaattgggcgggagtttcaacttgatgacggtgctcttgcgtggaggagaaggagtaggagctcgtgtctcactctcgccgtcatcattgagcaggtcttctcccgaatcaggttcctcatagcgcgggcgacggctctgggtggttcgtcgacgggccgttcctctgacattgcgttcgacttcttcctccgattcttcttccacctcgtcgaagtcaaaatcctcggacagttcttcctcgtccgaggtgagaccgtcgtctgagtcgcgccgtctcttttttgtggccggccgcgactttttcttggggctggccttcgacttccggccggtcgaacggggataacgagcatgatcactgtagtcctcgtcatcggagtcggactttatggcgacctcgtccagggtacgctttgcgccacgagccatggcgtagttttggtgattaggggatcactttgaaacacaacgtcagcatgcaacgctccaatttgggaagtacgatgaaaacacagtcaagagggtcaaatgcctagctgacaaggaagacgcaaagatgaaaaggcggatcgtcgacgttgcgcgatgcgggcagagggacaacacttacgaatggttcagttgtcgccagcaacagccagaccactcgatcaaagggaaagaatattcctgtcacagcagtaaccgtggcactttcttcccgacaattgctgatcaatatgttagcggagacggcacggtggtggagcgcaattggggcagagatggaagggtctcacggactcgggaacgcgtgggaaaacaaacgtgtcggaaagctgtcagccaccaggacaaatgcgcagtacacagaaataattgcagcaagtagaagaaagtagaagacgatgcgagatcgagggacgaagacttcagggaagaagggcggaaaggactcgcgctcattggggctgactgcctgaattcatcagccacttatcgtggcgcaccgattagtcaacaaagtgcacgtgccaccctctctcaatggggggaattgcttcaatagccattgtcacccttcagccgatgaatcaagcccccatgaatcgagctattgtagagctccattctcctcctgaatggactaaatggattctattaaccattttgatgccccaatacggcacattcaggattgatgaaggtgtgggggaatgacatgatacaatgatggcaggaggtgtcagagggcaatttggaacatgaaggagacgagaatagggccctttgttttttccttttcgttgtctttttctctgcgacgctttcgaccggacctgatatcatgtgccgctgactcagcagtggctcgtgcccctgcactagaagatcgacgtgcatcgacactcatcgacccattcaccaagccaattgagaatctattagtttctttctcgtgatatttgtttttcattgatatacctattgatgttattcatgtcgcactacagcgccgataaaagccctggagacttcaatatctaatcttaacaagtgacgagaccacttacattgccatcgcgacatcacagggaaatctttttatctggagggatagtaatttctaggatagcaatggatttagttgaccatgtgtgtatatctcaacagttgaatctccaaataagcaatagtgtcaaaagcatcacttcacgagtagccatctacttccttccgataatttccttccatttagccagctttgacgccaagtcgacctcctcaatcctctcctagactttccggtcccttataatgtaagcacgcgacattgagagaagataagcactatttgaatacttgagggccgctctcagagcatctctgatattcttcttctcttgtgcagtgagctcacatcctcggaagctcgagcagcatgcacacccagtagtgcagtgaccggctcccatacttttttcaggagtagactcgcgtttctcgcagcatccgcattcacgcccgcagcaaccacctctcccagcacaatccttgatcagttcattttgcatataccatttcggattctttcttaatgattcataggcaagtttcatagggccaccgggaatgctgctttgccacttgtgaagctcacactcctgataccagtattccttctggagcacctcttgcgttttatccagtttctcgagctgtacttcgtcttcaccggtacttttgcagtttttggagtgcccgaaccttttcttgcagcgcttccttctgctgagcaagttcacggacatggtaatcagcaatgatgagctgtacgaagagatcgagcccacaacgagcttttttatagccttttctatacagaaatttgtactctgtccatccaattcgtttgcgttcaatccgccaagtctctgttctgaagaccatattggaggacacaatttggagataaattagatatgaagggagttagctttcaaggcaaagggttaactctacattacatcattaggtagtcgagcgccgacacccaaaaagtcacctctatgtgatagtcgacaaatgctagaaaaaactgaactttgatagagaaaattggtcatgaatacatatactggaagagtcacccctgggtaatcaaagtactagccatttcaaccccatatatagcaaatccacgctagttaaatatatgtgctgcagtacttaccttttctgtcgattatttttggattgtatacccaacttaatcacgagaggaagagagacgaataaattgacacctgaggaagcaacgccaagaccgatatacccgaaataggatgcgaacttcaacatcaccctagctcgtcttctcggatatcaacaacgagaaagaaggcaacggcttattaagatcacaacatgttttcgcaaccagctcgtcggttggcaccggctgtgatgtctttccaatccgctcgagctcccatgagccgacgcaccttcacctccacacaagccacattcaactcatctcagaaaccaagtgcatacaaggaaggggtgtgtacatatttttcttccagaccgcagtatttaattgcaatcttctaactttgtgtgtctagatgaataaatatcgagcctttgctggtcccttcgccaagatcttcttggggggcgtgttcgtctaccaggtcctttattggacttggttaaaattggaaatggatgagattaaggtggcaaaaaatggtgagaacagcacaaattaatacattccattaccctatcttgcatgtcgctaacccttcctgcagaaaaagtggcggtgctagagaaagaagcccgggagatcactagcacccagaaatgaacacaatcttgagaagaatctcgagaaaacctgtaccatattatgcttcattgatgcctagcactatattatattgtggctgtgaataatgtcatggcacttccagacttggagatacattgtgatgatcccgatcaactaaacattgcagaatatccttattatattacggaaccaggattccaataactattcaaaaaccctagtatgtcatgccgcagcatatttgcgcttccgctcgcccgtcgttgtagcttttagactgtgatcaagcgtctgtaccacagcatccttggtctgatccatctcgtttccctcgagggacgaagacgggaaccgccagtcctggcccctctctcctttcttgaaatgctcaatatcaatatgattaaacctctcatccaaggcctcggggccatgggtctttagtgtgactctgtggttacagaatccacaccaaaaatctgactggccggccagatcgagccggtgattgccagcccaagctgcgacgtgatattcatgaattccatgctggcgcaggtggtgggtatatgtgtcgggtcgatagaacagccgctcgcacgaggcgcctgtttgcacatcggtttccgtgcagaaccaactgggcacaccgagatgctgggagctctcgtggcgcttccagtcggccttgctgccgaatgacttggcacagtgggggaatgtacagctgtagggtcgatcgtggcgcttctggtgctttctaatgatacccgtggttaatacactaataagaataagggtcaagggtgacttacttcatttcacagcgaagccgggtctgctttgggcacgcgtcacattggaaccacccacgtttttcgctatcaggaccttgggcggtggcttcgttttcgtcagataaccgttccaatgccaccgaaagcaacttctgtagcatttgccgctggggttgggagagctgagcagcgtcggtctcaagatcgattccctcatccatattctgacttgatctccgcccgcggctgtttatcatctttgtcatggcgttgattaagttatcagcggcgtctgcaaccgatccatcaggccttgcgatggcacgttcagtggacggatcttgactcgtttttgacagacccatggaaccaaaagcaggcgattgagaaggagtcgagtctgcgagagacggcgtaccatactgagggggtcttggtgtggcagcaccaaatgtgaagatatcagtcctttgttgagacatggaatcatattccggctcgagatcggttgactggacagacgcctcatcttcttccgcttctaataccgactcgtcccttgagctacgctcgtcgaagttctgttctggttggtggaggatgactgtctcgtaccaatccatggacctgttcattaattagtgcatggaacattagatgtctcacttgaaacccgctttttaaggagtgcctccccatcctcttctcgatgcattcggttcaagtgttgcttgaagttatccagacgcggccacctcttgttcgggcgcgggcagtttgtcccaaaacacatgtacatcatcttgggcccacgctcgggctccttattgtgaacgcattttttatgacgggccagatcattaatggtgccgaagccgtccttccgcgggcaatttggaacgtcacatttgaagagtttcttgtggcgagcctcgtgtttcctgtggaagttagtcccctgccatcactattctcaaatcgcggctagaacgatataccttttgtccgaaggacatttcccaacccacttgcacgatggatgatcgcatcgcatcgaggtatccaccaactgcgacggcgagcccataaactccgatgtgtacgatgacccagacacagatccatacttggaatgaccaaacaaaggccccgactccgtaggcatattctctgtcatctcgacgtgcgggctcgagtccacgctgtacgaagaagcaacaacagattgcgttgcacagctggtcccaccgtacccggaatcagcggaatgatagctatctatatactggctcccgttctcagatggctcgctatagtgatgttgcgagaggcagcagtcctggtcgggcatctgaacagacatgttcaagtgcgagatggatgaggcagccgggacaccggtggccagtagcggattccaggcatcttggtcgcctatcagacgggagtgagcgtactgggagtagtataggtcactggggtgtgaaggccactggcttaagagtgggtggttaactgttggatcgagcgatccgagttggaggtctagtagtgggtttgcggcatcgaaggggatattcgagggtctaaaatcggacagatcatgtccttcgtgtccaaccatgatgccttgaaggatgtctgtggagtcattccagtccagctgtgtctgttagggtggagttagattatgattcgtgtggagagtcgtatagagttaacagggcacgaacctccatgactatctaataatgtctttaatataaagaagatgataaatttcgtgaagtcgagagagaataagcacccagtcaaatgggaggggcacagtattaaaaggctcgcgatgcatgcaaatgccaaaaccctacacgcgagagacacgcaagctccacacgacccgagccggttgacttcaccacgcgatagccgattcaagggttggaatgtgttaagcgaacatgattaggaatatgctcaataaaatatacacaaaaaaggaagaaaaagaagaaaaaagcaaaacagaaacccgggaggtaaaagctaagacaaagttcaccctcgcgtgttgccagcgtggaatgcaacatgtcatcccttgattacacagcccgcccctttacccgggtaaatattaatttgtaggttattccataaactgtggtgatattttccacatcaaaaatatgaggctgatagttaaaatccaataccggactaagatcacctcaaccctggtctcccgaggttgtccggttcacgatcggctgccgaacactctcacctcccagggttgattcagcccgcttctaacataatcgcagaacatccatagtttacacgtatcacacacccacgcacacagaaaatgtcgttagtccccctgcacgaggcatgcaagacaactccagccccccatgaagatctcacgataagtctccaaaggggaggaggctgctgtagggaagcaaggaccggattgggctgtgacaggacagacgatcaacaaggctgatcgacgccgatgctcgcttgccatgttcgtgcaagggataaataagataaatgcgcacgtttatacgcgatacatgtgtattttcgcatccaggagtcaaggagattaactctgaaacgagaattggagcactatctgaatttagcctgatctttactccgtgctccgtgctcggtactaaatctcggattaccattgatgatctccagaggtactttatgttcttatgaaccatggaaccatgccccaagtgggaacagcctagtacaaaagaggaaaagccaaaacataaatctgatctctcatatgccatgcgctgtttggtctgaaacgaaattcctgagcgcccgaaatatgtacagagatattgcgagcacgtgttaaaggaaagaaagcatgttagttaaatcatcatacatagtcatcattccagaaatacatgagatcgggaccagctctcccgatgctcgggaaaaaggcacaaaaattccttctagtaatcactaacacggtgaagatgacgtagaacaattgacagcaaaacggagagggggaataagaatacaaaaagaagggggcattgtatctataatcacattcgagagggacatcccgaagagtacgtcgcaggactgtaggggctgttggactccatgggttggtaagttgagtaagtaccatcggtggggtacatagagggataagggagatactgggttagaggatacgagtgctgcggcatgagatccgcccccggagatctcgatctcgggacggcgttataaggcggtgggtacgtcactgagttctgatgtaggggataggcctgggcctgagcgggacggagtgtggtttggtcaaattggcccgtcgtgtgcgtgtagcctgggaactgatcaggggtatgagagtctatcatggactccggctccatggaaagttcgcccccggagatggtgggataatttgccagaggtacggcgttgattgaaaacccaggattagccggtgtgctagtgtttcggatcgcgtactgcggctgcagataggtggaggctgtttcgggtagttcgtgtccagggtgatatggcgcggccgatgattcccgaatctgccccactttgctggggttggtggcaagggttgaagcgttgctcggcttcgctaatcgcaaaacgggcaaggcgagttgctccaggtgtttgccaaggtggactgacaactttctccactcgctacacacattcccgcagaagcggcatggctcttcctgcggggcttgcgtggtttcatgccgacacttttcgaccatttgccataatcggtcaagctcctgctcttttcgactatttggcacactctcggcatccacggtgctagaggctttctccgtccttttgatcctgggctctggcattttgtgttcccggaccaaatgctgaacgaaattgtccttacggtaacatttgtggttgcactcaggcaatacacatgtccaccattccaggtgccggtgcttctcgttctcatggcgaacccagtctgctttacgcttgaatgccttgggctcggtacagtgggggaatgtgcaaataaatggctgcacatcttcgtgaacgtgtttagaccagtcggatggtttttggaaggttttcacttcgaagcaaatggggcactcaaaccgggcaggaagacgactgactggtggaaggggcacgccaggagggaaatgtgtcgcagccgccgtcccatcacctggagaatactgttgctcgtactcataactgaaatttgtcacttgggactggatctgtcctgcctccggatcgttgggggcctcgagatcctgcaacaaagtgggtttccctgcctgaatagtacaaagggtgcctgatttgcacgtgtggttggcagctgcaatggaatgcttctgctgcaaatcaaccaagatcttgtatcggcggacttgctcatgtgctaagcggtgaatcaaagccggctcaagccttggattcaactgcatgatctgcgatttgaacccttcgattgtcggcactgggagactttggacagcgggaaaatccatagctacgcctttgttattgctggcgtgtgtatcattctcatcagcacctccattttcagggcccagaaatgtacttttaggtatttggtaggcgtccgaactgacatggggtgatgtgatgcttggaactggtggtccaccatgagctgtcatgagatttattagcccagggctacttggtcgggggacctcgctcctgcttcgacctcgacccttgaattggatatttaaagaacctctctccgtattcggtgagggtgcaggcgacactgcttgcccgacagcggccatttggctggtcattgaaagaagtgcgttgctcaaacttggcgctcgcgaatgacgacggtgcaagaacccattccgtggtgaataactcgtttttgccggcaagtcctctgtatcacgctgcggaaccccggggtagctattcgattgaccgatagaaagttcagatgcttggcgcttcagaatcgatgatgcctgcagaaattgacgcttcaacagactggtgcgtttcttgggtagttcggtaatggaaaagttttcgagagatgcaccaacattgataatgctattgttatcaattgttgcttcgagcgatgcagtttcgaggtcccgcacacgtctgttaaaagctatcatagcgtctgtggagctatctggctgcatcgcttgtaatctgggtgtcaaatcgcgagggggatcgtgccaggggtaaatatgaatgctttcgtcatctttagtcggcgagaaagatgaatagacctcgggggtgctgcgatcatatctaccagattcatcaacctcggctgagggctcctcggagtagatgtcaacgcttgcttcatcttcgctgaggtcgtcgctgctttcatgaactaataccccgggcccaggaaatgatgtgtcttcggtgcgacatttgaggttgaaataatcttcttgtttcaacggatgatcaccggtactcctcgctcgaagtctcctggaaacaaggtgtgggcgtggacgcggtgaactaggtgagtccccaccggcgtcgctgttggctgcgctcacagagacagaccaatgagaaatatccacatttttctcgctcctttctcgctgaatatagacgtcattgggacttggcacgaattcatccccacgggacgttgggtcaatgccagctagatgcgttgatgggtttagaatccatccgccattctcagatcgcttcacgggaacagaaaataccgagtgacgatcgctatcatcttcgtcttctaggtcgcttgaattagcagatagatgtgcaaaggactggctgagatgtctttggggtgatgtgctgcgttcctcgggcgaatcccctcgggtgaaggttgtaatcttaacgatggggcttcttcccctggttgcacccgaagcctgctcagtggtcaactcattggtcaagacaccgagtctcggcggctcagcacctgcgttaaagacaccgaggccagactggcacgaggtggggattgattgccgtgccctagaattgccaggaggctctggacccgccagcgtgggtgatggattcggattctggttgtggtccaatcccgtccactgaaagctcggcgccatggaagaaccccataccgcatcgacaggcatattttcctccccaatcctgtacgatggcaggttttcattttgccatatcgaaccactagccagttcgatatccttcggttccacgaatacacttgtatcagaaataggggaggtgcaagtgcttgggtccgtataatcatttgctctcgggtccaaatagccctgggttgtggagtcgatcggagtttcctcatgagggggtcccgcacggtatccaggactcccccgcgttggcgttagtcgaatggcactggcctgaaagaagatttcctcgggatcagatggggctgataggtaaggatccggagcatatcgatcttgggttgcatctgctggcgattgcccctgggcgctgagtggggaggcgtgcgacatattgaaatgaaatggcggtcaattagccaaagattgaccgcgagaacgggcatcaaattaagccgaattagaaagcatcgagtagatatcgtcgtatagattataaaagcagatttgcgattatattggagttgtgtgtggtgtttggtgtttggtgtgatgatctggcgttctggtgtggtttgacgcccccaatatataagggaatgaagggacagacgaggccgcaaatagttcaggttgaagttgaagttgaaaatcagagattaaagagtaaatgaaagaggaagataaaaaaagaaaaagcagaagctatgggggccgaagattagtcggagatgaggggaacagctgaacaagcgccgggcgcatccctccacttctgattcaatacaagactaagaagaataacaccaataagatcaactatcaaatgtcgacctggtaatgccggactgtcagccttgttcaaagaagaaacaggaatcaaaatgctccgctttttcacggagcctcactagggaacgaccctgtggctgtgcaagttgcattctctctttacatcattacctatggagtagtattatatgaagcattatatgaactatcgatattgggtacttcgtatgcttgtatataggcgcctcagccacagcattatcctgctctggccgtgtccatagggctaaatttattggaacacacggctgaatacaatgaaccttttaccgttggtcagaaattgctcaagatgaaaccggtttatgcagtattcacattcccaggttctatctatatatctgaccaatgtcaatagtaatgatggtcccttctctacgcgcccactaatgtaattatagactacagcgcttatgagatttccataacaaacctgtcaagatagaatttgaatcctacctagttgcaagcaaacccgcaaggatcttcaatcttcatattcctgctaagatttcgctgaatttgtagggttgatgccttgatatgcaggctatatgcggtgaagaggtagtccggctaactttggcagaataacccaaccggcagaataagtaaactagaaaattgatgtaactacagtgtagtgatggaatgatagagggagagagttgtctattcctaaaggggcagaatgcccaactatctagttgtgggggttggtgcctgccgcaccgagctgatggtcaggtgaccacgatgtccaacaagaatgaaccatcattatcttccccagagcttctacagtcacactttacatagcattaaaagttagaatcagtcgttttgctctaaaacggctatcgggcggccgcagaccatccagatccctcgtaggtatactgttgtaaatgttgtactccagacaatgatgaaaggtttgcaacgtttgtaaagtagtcagctatatcaactagcagctgcttcatactttacaatttgcttcttccttttttcttaatcttcgatattggttgaatatattatttcttctggcacctcacaatctaggaggtatatatacctctattgtacctaccctatccgtactttctagttatagaaggaatcgctctttattatctataccgtttttggaataatttttggaacaatttttgagtagttattagagcagttattagataataagtaccggggagaaaggaaaaggaaaactacttacgggttctgctcgcctgctataaggactttctgtaaaccatataaatggtgattccctttataagtagcaagtgcagatgcggtaggacactcagatcgttatatataagaccgctgctcgaactggttatactttattcatgttaatttcggatcggaaccttccgcttcctaaccctatttctatctagcttgccctcgactgatatcgtggtcattttcatcatattgtcagttgcaaccatatcttccttctcgcaagtgagcgctcattcaatgggctcctgctcaacatcatccaccttttctccgttcgatggtcctattatcatcgataaaatggggatggcaatatcactagaggaattctgaatcctccttctatagcgatttgcctctctccatttgatgcacctcagaccccacaattcgctgtccacgcggttgagtacctctccaccgacctacaccttcatcaagtacttctcctacgacccacctttcaacctgtttcccacaaccagcttggcggagcctaagctcttgtagctcgtcctaattattaccggcaaatctaatttcgcctcgtggttcacatcattacactcccgacaacgtcctttgcgacgccaatttgactgccaaatccggcaacgctcccactgagccaaggcatttttgtatctagaatatgaggaaccgtgggattgatgccgaaatgaccgctactgagaccgaaaacggttgcctttccacttgtatgtttagacgtccagccgcttcctaaccgcccactgccctacaataccactattctgcatcctaaaggggctttatgagaaggaccagtcagttatagacacattctttattcagcgacacacactccccgctagctacttcgggtatagtatccacctccggctgtccaggtttgatgcgttattcgcttttaatctacgtaacaacgatctccttttgattttaaaggcatcattttcgggactaatcgtgccaagctattgacaatcgtgccaaggtgtcagcaacttggcattcgaagtctaagacatccgttgtatgttgtagtccatactccgtaccgttgacgccaagatcattcccgagataagataggcgttcgataacgagcctaagccctagagggttgtaagatccggggtcaacacgagaacaagacgtaattggatggctgaaattctatggaacacatgctctcggatccttatcttagcttagatcgaatcaagtccccttcttatcatgaataattcatccgacagtcacagattcccatgaactataggcgactactatagattcaaagctccccgttgaaacaatagtcttggctgctgtcatagaatagataagatgcccgaaaatctttgttttagctattatgagctatgtagatgtccactctgctagagaatatatatgtactgtggacccccgagcagaggagttaggattgcgatcccattctagttctcatcatggccgactctgtaagtctagtatgatggaaatgacacttgcacacagctgacacagtcatataatatagccagtctacaatgcatctaccccaacaggcggagatccactcaaggtcgatgtaaatgctcaatatgcaggcgtcgagtggaactatacctacatcatcctctgctcgttcattgtttggttgatcatccccgggattggtcttctctacagtggtcttgcacggagaaaatcagcactggcattactcttccagtcgttcatgattgcggccgtgtacgttaaggtcttcttcaaaatccacgcgtacatcgtactgacaccatatatcccgccaggataacgttccaatggatgttctggggttactcgttagcctatgcccgggatgcaagtcccttcattggaacccttaagaacttcggtctgagaggtgtgatggtagcaccatcgcctggctcggcggatctcccggagattgtgttctgcttttatcagcttctattctgcgcatgcacggtaagcaacacataaaacagaatgtcgcgagactggatctaatggaatgctgcggtaggtcatgatcgttgttggcggagctttcgaacgaggcaacatgatcccctcgctgatcttcggcttctgctgggcaaccgtcgtctactgtcccctagcctgttggacctggaacagcaacgggtggctgtataacctcccatcacttgatttcgccggcggcggcccggttcacatcgcatctggctggtcagcattggcttatgcctttgttttggggaagcgcaaggatatcgacaagccttcacatgcgaaaccccacaacaccaccttagtcttcttaggcacgtccttgatctggtttggatggttcgggttcaacgtatgtcacacctgtgccttttctaaactcaagtctgacagcagagatttcttagggcggctcgactctaaatgctagcatgcgggcaatgctagcggtatttaacaccaacactgcggcttgcacaggcgtactcggatgggtgctggttgactatattaagtatcgtgggaagttttcggtcgtgggggcatgcgaaggcgcaatcgcagggctagtaggcatcacgccagccgccggatttgtgtccgtgtggcttgctgccgtcatcgggttcctcacgagcatcgtctgcgcgctcctccaaaacatcaatgagtggttacacatagacgaggggatggatgtgttcaagctgcacggtatcggcggaatggtgggggcattccttaccggcatctttgcgtcgcaatctattgccgcgttggatggcgtgaccgaggccactggtggcattaacggcaatggagtgcaggttggaaaacaattggccgaggtgtgtgctatctcggcatattcttttgttgtctcctgtatcctgctttacattatcaatttcataccggggatgcagttgcgcgtgcatgaggaggtggaaatggttggcctggaccgcacgcagtttatcgatgagcagattggtgagcgggcgctgcttgacgatctatgcgggtcttcatcacctgcaagtgtgcttaatgggcagcttcctgtagtggttgggtctgagggaacgaaggaatgaccgggttagagtctcgtctcgtgacttcaaatcccagaattgtatgtcgaacatgtaacttgtctcagatattaacttcgatgtttctatttttattttttatttgccatctcgcttctatgtataatgttttagcgagagatgcccaagaagaaagcttgtgactttcagtgtgtgactgaatttgtttgtttatttgtttgttttgttttgttttgtttttttttttttttacgaggattctaccatacagtaacaggggaataggaaaagccttcgccaagacagacccttgttcattagagtgacgcaacgaatctccccatcggcttccaaggccggggaagggaggggctgacgtatactttcccctctccccggcattttagtgtcctgtagggtccttttcccaagctgcattccatgacgacgaggctgggatacatatccgcttacaatgtatcgactaccccgtacctacagagtactatagttaataaatagtgaagttgagatagtcaaggcccaagtggaactgtccctgtcaagattaaaacaacgtgattagtctgcatgccgcagtgagatgtgtacacatctgcaggagaaactaagtctgtagtacattcgagattgtacgttggagacattggatgttattcccatcaaatgattgaaaatctgcaggaaaaaaaaagaaaaaaaaaagattacccggtcacagaaacttaaattacccataaattaccccacttttcccaattcggaccaatctgtgcccattttgccactgaaaattccgagtccggcccgtcatgtttcgtaccgctccggagtcgtcgcgtccaggccgcttttggcactctccttatctttcttggccttccaaggttggctgtctctctcctcactctactcttcactctcaagtcttctttactttccgtcattcgtttaccccatattcttgcaacctaatttgacaaattgatcctctgcttcattttgagcagtcttgtcatgctctgcgaataatcaaaagtccaaatgggcaaatgtatgcagtcctaccctaactttcatgatgcggcaaattgacctttctattagggcgttatggtgtcgtcctagacgcaggatcgtctgtatgtcgactcatcccggagactcggagtcatgccactaatcaactgcacaggggactcgcgtacacgtttaccgatggctacgaaattccgcggcacgaaagaacgctcatgtggaggacttgaaatcgctaccggaaatcaaaactaaagaagaatggacgaagaagattcacccaggtgagcgctgctcaagccaatacggattcgtcgacaacatactaacctatctgcgcaaaaggtgtttcttcattcgccaacacacccgaattggttggatcagaccatcttgctcaattattagaccacgccaaggggatcattcccgcggaagatgccaaggacactcccatattcctccttgccactgcaggtatgcgactgctaggaaatctcgagcgacaattgcttctggaccagatctgttcttatgctcgtgacaactcaaactttttacttccggactgtggggttcacatccaggtgattccgggcgtgaccgagggactatacggatggattgcgacaaactacctgatgggatcctttgatgccccggagaaacacgaccatggaaagggacacagcacctacggattcctcgatatgggtggcgcatcagcccaaattgcgttcgccccgaatgttacggagacagagaagcacgccgaggacctcaaattattgcgattgcgaaacattgatggatcagttcaagagcacaaggtttttgtcacttcgtggttagagttcggcgtgcatgaagcccggcgacgctatctggacgctttgcagatggcaattgggccaggtatcaaagaaatgcctgacccttgtcttcctagtggattgcgcaccacacttgatggcagggttgcatcggcgagcgagacagaaccttatctgctaggcacgggcagattcgacgaatgtctccgtcagacatacccattgttggataaggatgctccatgtgcggatgaaccgtgtctgctaaacggcatccacgttccagctatcgacttcgatgttaaccattttatcgggatcagcgaatactggcacaccactcacgagattttcgaaatgggatacaaggacaaagcatacgatttcaacacgtatcaagaacgggtccaaacgtattgctcacaagattgggactccattgagcatggccttggacagcaaaaatggggaaagaaggttgatcgccaaaaggcctacgaagtatgcttcaaggcatcatggatcataaatatgctacatgatggcattggagtgcctcgcgtgggcttggagaatacgactggctctttgcacaacggcaccaaagaagtcttggctcatggaaaagaaaagggctaccttgatgctttccaggcggtcaacaagatcgactcgaccgaagtgagttggactttgggcaagattgtcttgtacgcgtcttctcaggtgcctctagagatcgaagaaggtcttccagtaggctttggcagcaatgtccccggtatcccggccgacttccagtatcccagtgttcaactactaccggattcagacagcttccacagtgagcactggcatgatgcgctattcgacggtgattctccgcgccgaatcccaggcttcgtcctcttcatgcttatcgttttcatggccggctttttcttatgcggacgcagccgtcgatcgcggcttttcaaccgcgtgagtaacgtgttgcgccgtggtgggccatcgcatcccaatcatccaaagaaacggaagggactcaaatcgatgctgccatttatcagtcgaagtgccccatcttacgagcgagttctcgaggacggtgctcaagagtatgagcttggtgccgtcgagtccgacgggagcgaggatggtggacgtctttccgaggcagacttggctagactggtaccaccgaagcgagcgtcgagctggggcagcaacagcaacactcccagtttcaaatacgcgttagataatagttcgaccgggacgattggtcttgggatcagcagtggtggtggtggctccggcatcgctatggaccgagcaggcttagtagtcaggacggagagcagggaccacctagctcccattgctctaggccctacaacgaacggccgtcggtcaagagctggtagtccgacgagatctcaccaaaaatcacccaacatgacaccactggccgacgactaacgcgacgtgctgacctgaattatgcttaattacttacactgcattgcatttccacttggagtttgattgtctgatgcgtcgactcatttcgacgttgtcttgtctttttctttttcgcaaagggagttctcttcttatggtgttgcgtgcgtcgtggcaggctgctttcaattcttcatatcatatttcaatactgtgctctggagtacctttttgttggttggttacggtgctttcgttctcaggccggtgatttacacgtaatgaggtatgtactattagtgattgagaaagcttttcctgaatatagattaatacattgctagagtctgctttgcgttcaaatcgtacatcttagtatcaatgagcatatctttatcaatttaatatgctagccctagtggtcaactacctacatacagtgattgttcacacgtttcaacacatttggttatataatgttctgctggcttataactaattgatatgaattcaaactatcgatcttatatggtatataccaatcctggctttcaatgacagacagctctaattcgatgagacattgtctcggagagatgccacagatgatctagatctatcccatgcttcatataggccgcgtgaactatataggtaggcggtgtataggtggggcttggatgaactgagcagttatcaatagtatcacgtgttagttttgctaccgccttggcaaaaacgatgtagagagaaactggcgcaactaagcttccgattcactcgttgcattgattcaccaagcttgttcaatattcttctacagcacttcacctatgccgtcgcgttaaaccccaccattccatacaccccttactctcggcaacagctctcatcgccaccgccagtatgcgcttgactactgagctcattcaaagttcactaacttacatcaatccgctcacagatcgtgagctggatctccgaggtgagttcacccactatagacctgcctgaaaagaacaggtactacacttttgattaagagctggattgatatcgtcttttgcgtggtcgtgcaggtcataagatccccacaatcgagaacttgggtatcgccaaagtaagtgctttgtttctttcaatctttgagaggcagatttgtccctgttacttctttccgtgttactactagaccaatttctggtctgcagttagctctgttgtacctatatgaatccaatgttgacagctcctaggatcaagatgcgatcgatttcaccgataatgacatctcctcccttggaaacttcccccattttcctcgtctccgcactctccttcttgcgcgcaaccgtatcaatcacatccaacccgcactcgcaacttcagtgcccaacctgacgactttggtcctaaccgcaaacaatgtgtctgaacttgccgacctcgatccgctgcggaacttggggcgactgacgcacttgtccctcttgcaaaacccggtgacgcgcaaggaggtatgtttagccctgcgccgtatactagttagatccggctatatatgacatggtccagactcaattggaagctaaactaaccgattcctgcagaactaccgctactggactatctggcgcattccctctgtccacttccttgacttccagaaagtgaccgacgccgagcgcgctgcagccaaagagctattcggcacctatgaggaaccctcgtccctcgcatccaagattatgggtgtcaagtcccgcaccttcgacgtttctacccctgctgaacgcacccccgccgaaaaggccatccgagtgcaactcaccgacaaggagcgcaagcgggtcgagaaattgattcgcgaggcgaagagtttgcaggagattacaaagttagagaaggagctcaacgagggacggatacccggtggagcggatgccgatggtgacgaggccatgcagatgtgagggatgagatgtggatctctcgcatgggttgtgtcgtggatgatgaacatgcaatcacgttttgtctttattttctcattttcttctcgtctggagcttggctttctgggtttcttttctggccctattgtatctgggtattcatttattcatgtgcccttagtttgggattgggaaaaaaaatatcccagctatgaattgtgagcaaaagatcatttgatgctctaacataaagtacgtgttagtctatcaggctgaatctagacaatcgccgagctatcctaaatggtctgccggctatcctttgcttgatgacccatctagcagcccagagtttccccattccatgtagagatggaatataccccgaagttatgagtgaatcccacagaatattgggagtccacgggtctacggttccactgtattggcaaattagtcagcatgtcatgtcccgttcaggtgatattccccgagtcatctaattttagttaagagttacataccattaatctataactactgcaaaggtatggagtatacggtgtacattcgtcgcactgcatgtctctaccattagacgatgcaacctcggtgcgttggcagggataagacggcacatagcgtgtaggggatataattaaacgaccatcaggaaatggcaaaaagtatcgtttatgattcagttcatatattgtatgtacgcaaaacggaggttggttgtggaaatacctgcaaagttccgatacgtcatggccacctagtgatttcaggactactgtcttctatatcttcaacggcatataagagttaccagaatatattttctcaactgtttccttagatcatagcctatataccgatgcgtattctttctaacctcgaatatcggttacatcgagcttgtgtgagatattatggaagtcccaatagctctagttgacgcacacaactcgagaagaccatccccactatggagtatactctgtcgaagcttggaataatgcagaaggcgggtcaagcctattcatgtttgaccgtggaaataccattcaagctgtgtcttcatcccacgtgttggttatctttatcccacgtgttgacctgagcgggcccttcatgtctgagagccacctaggtatttccaagatgaagaaggggcttggctagggcctgccaagtctcgtatttcatggcgatcacatcctaacacgagtgatgcgaggggaaagggccttttacggatgtgtgtagaggcttggttgcacttcatatccgcccataatattgatgaaatacgctataaattgcatctttcccaggagctgtacagagtactcactcagcattgttgaaagaaaagccccattggtactccgtaccaaaattccccatcatgcggtatacattggtcttcacgactcttctttctctctgcctccccgtcactatcgcgacagacccccgttactgccagaataaaacggttcttgatggtgcagatttcaccctcgaagaatccgcagacaatgctcacctccctgtgctctcaaagtactttgagtccaagggtaaaattgccaacatatctacggttcttcaatccgcgaatcgtgccttaagtaaaggttcgccctctgtcggcaatgggtctccctccgaggcatgggcttggaactcaggtgatgacgcgacagcgacttgggttccgcagggaatcaccggctctggtgatgctttgaatacgggaacgtgggatggccacgatgcgtgggtcgtcagttggtatcgttctggagaaagtgtacggcttagctttattgatcgcgcaacgcacaattatcgccatgtgatgcttgtgaatcctactgccgacgataactttacagccatcgctattcatgcgggtggtatcatgtggtacggcaatgtgctgtttgttgtcgatacccataatggtattcgtgcatttgacctggacaacatctgggaggttgagattgccgatggggtcggaaaaactacagatggagggtattctgcggatcaataccgatatgtgcttcctcagatccggtgagtctatctattatcttccttttgaccaagactgataccattcaaagcaattatcaatggacacccggctccgcttctcccttccgcttctcttggatttcgcttgatcgcagcgattcacccgacaccctcatggtgggtgagtttgtgtcagctggagaaactttcgacgatgccgcaaatacgcccgtccctatccgctatgtgaaatacgatctggattatgcgacccggaagctgaagactagtgggggcatcgcttccgcaagctgggcgtactgtgtcgatatacccaacgtacagggtgctgtttcatacgacggcgagttttacatctcgcgcagcacaggcaaagctcccaagcaaggcgatcttttcacttgggaagaggggcagacagcgacagagcacacggggtggttcatggctggaaatgaggatttgagctacaaccttgttcataaggagtactatactgtcaccgagtatgctggagatcggtacattctagcctacaaggtctagttctacttgatctgctattgagattatttccaatatccaccatcggtgacggtgccgacggagttgttaaacaaatataagaacaaaaatatcacagttgccatgagagctgatacaataattgatgggatacagtgaaccatgaaagctggacttgtctaaccttgtaaacttttatttatttcaatgacaacccttcggagactacatgcactctgaagtcactacagacgattagctattgactgctctaaccagagatatctaatatctgatcccccgaatgaaaacaagaatatctaagacttaaaaagacatcaatacaatcaaccgttattaatattacctccctgaaagattcctgatacagggcgctgattggattgatgctcaaatatttaggctggcaaactgcctgtaagtttccatttttggcatcatctgggtttaaaatattcaaagcacaaaggcttgcaaaatctcatgaaaatgcatatgcttcttcttctagtgtctacaagtctatcattcgatctcatactgaatttctaactttggatatgacctaactaagtgctatccgccgcgtattgggtgctatcgtcttaagggcatagtcttacactattcaactagcatttgaattgcatggcgaacaaacaaatggcctagtatattaaagatatcaagtgcaatttggtatgagtagtgcagaaggtaggtacgatgataacaagaccccgatacaattagacgatgaactcccgaagttttttcttgttgagaatttctccttccaccaatcgccctgtctcagtgactttcccattgacttgctcatagcgtaccagcgcaggaatgttcttagtgccccacgtttttcggtagacattttgggggttattccatctgatagatatcagttcaatgcaccacagggacacgctttgaatatgatttgaacaaaatcctgctcagacacgatggtaaaacttactctggcttttgtccaacctcgatgatagctaggtcaggcgcgtcatccccggcaaatgccttgttgatgtgaggcaaggcatctcgtacgtccggacaccaaggttgcttggtaattggatctggtgaagatatgaaggcaatgaataattttgagtccgggtttactgtcaggtccttcgccgagcttggcagtgtgagattcttggtaattggcattcttgcggcttcgtatacagttcgaacttgagtgcagggtgtagacaagaagtatgggcgagacagtaaaatatttttcgagatatgaagtcgaggcatttacaatccgacatgagacaattgtcaggtggcttttgttgattccatgactaagcatatcgcaattctggggcctggtggtgcgcgaggcttcattttgtcaacaattcaatatcgcaatcagtatcacgggtcctatttcccatgaacaaaggcacccttctctaatgagtgttggattgcaattttataaactggtagctatacattctattcttgtaagcctcagctttcagtcccttgccctattcactgaattattgatgcgtgaaccgacgtgtttttcctgatgatcttcttcttttcaagggacttttattgggctactatgtatgtggttagtgctaaattgtgaattgtggatattctcggattccccgaggctgggcgttgacacttttgtctcagattcaatgtgtaaaggtagaagcttggagaaaaaaataggcaatagattaagtgcaccatcttctgcttgcacaggtcaggctcatgaatttgagccacatagggtaccaaataaaacataaatgaagtcaatggcccctaaaaacgaaaacccgtacatttaattgacctggtcacttaagtctttggcctcgacgtcctttccctcatcatcctgtgcccacatgctatcggtaggctccccaggccacaaggtagcacagagcctacgcgcatctgcccagtcttcatattcaccatcagagctatacatcattagaatggattctctggacggatgtaacatgtagcatacctaagatcaatattcttcggcgccagcatcctctgagaaggatagatgtaacgaccacatcgtacggcctttcggcagtcttgcaaaaagtccactggccgggcttgcacagtatgaattgctcataggcatcttctccaaccccgttcagatttatgcctttctcagagcctatgaccacttttgttatctcatcttcatcttaagttgaaccagtgagagggacccggccttctttgatgattttggggatatcttcgatgagttgggcccaggccttttgccattcaggtgtatcccagccaaggatggcatagtagtgcgtgtaaatgtatcctattagcatgttgtcatctttgatgatgactagactgaccccatggttaaactgaagcggtgggagtattgtcagatgaaaaaggaggaaattaagctgttggaaggtgaactcagaaccacgtcacctatggggaatctgcataacctcacaagcttccaatcttgctgcggatagagagagggagaatagtgaagaaaagagtctatcaagtgaccatttaggatgaggttttacgttttactgcatcttttgagatgagccaaatataatcttggaaaaaaaattgtcacaaagcctccagtcctctgagcactttatccccatctttcattctttgtctaactgtaactgtctttcaaaatctcatagagatgactgaagcgagtgccttcacctggataacctagttaacgctaacatctctattaggccacttattcgataatagacgatcgatgcttagctccacagcttcgccatgctcttgatgacttgagaacagctgtccattcggcaaattgctatctaactacttctcgctttctggactctttcccaaacctcagtactcaacactcagaaatccaaagagctgttgaaaaggtggctcggtttgcgcgggagcaagaagagaatacggctcaggctgtgcaaaaagctcaaacggcattcgaagctctgtctcctgaacatcagcatggcttgatgcagtactacggggaagatctcaatttttatctcgaaatcgccattcctctggacctgtcgcgtactccctcaacccctttcagggaattccaggtgttgctatttgacattgaaaatattcaccgtgcacttgctcgggtacgtggagttgaggcgagcatcaccaatgtattttccagattaccgtccatccaacgactgctgctggaaaatcgggaggaggaacttcggctgctaaaacaacgcagctcagctgggattcaattgtctaggaaattctttgccttggatcgggaacaacagagtattctttggttatggtatcaagattctatggggatcagtggaatccggagggatgacaatgcggaatacccctactctgataggagctgagatggagataaccatgagcgtggggggattgtcaattacagcagtgtcccaacatgcaaaggtagaagaacacgaatggaaaggacgggcaaatagaggggaagaataccagacgcccgtgaggctgtgacagtctcgattggtggtatcattccttgaatcactgacacatgaatatccattaacaagctatcattgacctggaacccctgctataatttcctatttattggtatatctcgcattcttaatctcctctaaacattaccaatgcttgggagtgtggggtagataacgaggattctcggccagattgccgtgtttcgggaacttgtctttttcttatcctttgcaggtccactcctctatagcgcttcggataactgtccaaattgacaatggactctgcctcgagacgacgactaagaaggcgagttgccgacgagaatcgcaaaagggcaccccgagcgtatgcatcattcgtctgagacgaggcgtatccactaactgggcttagatgcgatcgctgtaaggccaggaaaagcaagtgtgtggaggcgactccgggcaaatgtcagcggtgccttgcaagtaacttggcctgcatgtttgggaggtattcagtccatgacctttaagaaagcgcttttttaacgtgaaacagggagaaatcgcctgttacccaggatactgcgtcgagtgaccttcccgaacctggtatagttgctacatcgaccagaaaccgagcccaactactgcaagatgatatcagtcatactgatccgctttctccggcatcagtcttgtcccaaaagctcgccgaacatgttgttgcaggtcaatctaaaagggccccgtggccaaacatcctctcccgtctgagggaggctttctcgctagatccggatgctgcacccgaagagagggacatggtcgccatgcaagccgtaagccatatcatatttcggttttgagcccatgtcaactgacgaatcctagcatatgacccgtccaaaggcgcttcatccatatgaggtggcacgtttacatgcagcaattgatgcattccccccgcgcctcatcgccgactttttgatttcggtattcataaaacatgcaacagatacattcttctactttgaccaggaccaaattctgtccgagattgaccaattctacacagacaccacctcgccgttaagatctgacttgagctttgtttgtcttgcaatggcaatattcgcactaggtagtcaatggacgcccctagaaagaccagatgaatttgcagtcagcctacatcgagataatgatgatttaggtcaagtgttctatactcatgccaaaacgcttatacccgacttaattgaccgaccctgtctccgatccattcaagcgcccttcttgctaggtgtctatctaatgccagcaagtgccatcggatcatcgtatgtctacatgggcttggctttgcgcaaagcattggcatttgatctccatctcaacccagaagatcaagcagttgacgaccgagagagagaggtccgatgtcggttatggtggtcaatatattccctcgagaggtacgtgatgggactctcgctgaaataaatctcactaaccacgtcaggtgtaccactatcaaactaagcaggcctcgctctgtcgatgccaatgtagtcaaagtaccacatccatcgcctctcccagcactggatcgtctgcaaaaatacaacaatattcaattccagatggcgtatgctcgtctgatcaagatcctcgatcgaattgccgaaccgtggtatgttgggccgattccgatagaataacaagcacttatattttatcagtagtggtgtcaccgaagcggaagaacagtcagaatccgaaggtctggcttctgatcttcgacagtggaagaagtccttaccgccagatttcaagcttgaaaacgtggacaccaaagactcaagatatcgcacgatcttccatctatatttgaattattactatgcgtggataaccatgggaaaagtcgcccttgtaacagttgcccgaacgagccttcgttatcatatgtttcctgcgtcgcgccctcctggtccaagcgaggccaccttgatgcaatcccgatattgcgcaaaggcgggcagaaaacttctcctactgttcgagaatttgacacaaacccgcaagatcactcgtttctcattcacggacttccagggatgcagtattgcgacgatcgtgacgctagtggctgggatcacagaacgagattcaggatacaatgctcgagtgaaatttggcttagactgtcttcggagaatggcaactggaaacatgacagctaaattgggggtaaagtttgttgaagccgtacagtcgataacaaacgaggccgcggagaagctccatcaagcgtcatccacggctaacgaaacgcaggatgtacaaaattcggcttcgacatctgattacaatcaatgggctgaatggcttacgaggttggaacgctctcagaccctggagcaaagagcaatccatgaggcagagcccgatgtgccctttccacatactgtactgcatccaccacagtcaagcgataatacgtccgattggaggactgctggtgaacagtatatcccggaaagctcaaccccgcaaagcctagcacatggttcaactatgttgcgggagttccagtctatagagtacgaccttttgtcgggattccagagtgatgatccagcctttctcatgggcttgactgggattgatgtcctagacttctctgggctcacataaatatgtacctagtgaagagggaaatgcccgacgacacaacaccaaccatccaaggaggtcagctagcaagcttagggatcatacagatctcagaaatcatccttgtatcctagaaaaataactttctgtaagcccctttccattatgtgtcgtgtatgcgtgatttcctgtactctgagctcccctatctgacatccatgaatgagggacatactatcagcaccccaaattctgctagtcaaatattcgccaattagaaatgaggaagaatgagcggtattaaaaattcagaaggcggtataactatccaatgaggaaggcggtagcagaagtcactgtatatctatttctgcctgagaaacaaggcaactatatttctgccccactacgaagacctagggagtagggagaatgaagacaccacaccaccatctttaactcggatatatttatgtctatcatcacactcgcaacaccaactgcgatgcaatgcaatgcaatacagtatacagcaataatcattgtactctcactggaatctgaccatcctccagcaatgcatcccacctactcttatagacacgaccatccttcatcacaccaagcacatgtgcatcaggcttatcaaagacggtcacatcatcaagcgggttcttatttagaatcacaacgtcagcatggaagccctccttgatttgacccagctcatccgcgcatcccatcatcttcgctgggttcacagtagcactacgcaagatctccagtgctgataagacctgcgagcgcagtgcaaattcatgggtctgcgcagagcccagtggacccagcaaatcagagccatagcacatagtcacaccagcctccgaggcaaccctcaaagcctcaagaccagactttaacacgatcgaattctttgtctgggactcaataggcaggtagttcttccaccgctcagaagccatctgagcatatgcgataagcgtaggcgtcaagtagacccccttctcggccatgagcttggcagtgggtgcatcaacgaagttcccgtgctcaataccacggacaccattatcgatacaatgccggatagccttcacagtataggcatgggccgtgacaaaagtcccggcattatcagcacattccaccatcgcctgaatctccgccactgtaaactgcagatgctctagcttatccgttggcgaagccacaccaccggagcccataatcttgataaagtcggcgccgcgtcgaatctcctcacggacagcagcaatacactccggcacaccgttgcacatgcggcctaggtggttattgtcgtgagtgccgccgcagcattccgtagcctcatgcgggccgcgcagatcaccatgtccaccaaattgcgagagagcatggcctgcgataaaaacgcgcgggccagggaagacaccgtcttcaattgcctccttcaaggcgagctgggcaccgccacagtcgcggatgctggtgaagccgcgatgcagcatctgcgaggctgtgtaaggctggcgcaaaaggtgtacgtcattcggattgccgaaggctttggataagtcactatagcccggaactgcgcataaatgtacgtgggcatcgaatagaccggggcagagatatttcccttggcagtctactgttttgaggctgattggtgaagctgggatggatgattctgagccgatgtaggtgattttgccctcagtggtgatgagggttgtgtttgctttgattgtgcctgtttcgacatcgacgatgttggcattgatgaatttgtatccctgtggtgcagggcgtatccatggcttgatgtctgagcccgggagggtggtttgtgacatattcggcttggggtgagatgatgctgataagccaagatatcgagtttaaatattaaatttgaaagctgaaagaaatcactttgcgggggtctctcacatttgtcgggaagttggtcgacagattcccgatgccatcggaccgatgcacttctccgcatatcaatcatatcaccgacaatcgaagataagccttcttttatagccggtgggaaatccggggcatatcagttttttttcccttgcaaacttgagcattcctcctctttgactgttttgttttgccgaaatccaattatctcattcgtatatatcaaggggcttcaatcccacctgtattaatggacaacttggagaagcgtgctgcgagtagcgacaatgccgatcaatcaaatggcgaaattctcgagcttcaggggagttacactgcggaggaagagaaaaccgtcctgcgcaagattgacttggtcattttgccttttgtgagtgcttcaagctgtctttcgggatctttttcgggctaatgacgcatacttccagatgtgcttcgtctttttcctgcaatatattgataagcagagtctcagctatgctggtgtcttcggtctaattcaagacctcaatatgacaagctcgcaatattcatggtcaagctcaattttctatgtcggccagctagtcgccgaatatccatttatatatctaatgagccggctcccattgaccaaattcgtcggtgcgactgtgtacgtttactcttgcggtactactatatctgtcctgatcatgcgctaaccaccaattcagaattgtctggggcatcatatgcatgtgcctcgcagcaccaaacaatttcgccggatttgccaccgtgcgctttctactcggcttcagcgaaggcgctgtctcgcctgctttcgtgacgatcactagtatctggtatcgaaagaaagaacacaatgtccgcacggcattatggatatctatgaatggtctggcacaggttataggctgctcccttatgtatggcattggtaaaaacaactcgcttccaatcgctccctggcgcgtgctatttatcatctgcggcgcgataacctctgccgcaggcgtggcattctttttcttcatgccaaacgggccgaaagatgcttggtttttgaatgcccgcgagagggaagtcctttcgctacgcatggcacaggatcgagatggtggtgacaaggcctctttttccgttgcccagctcaaagagacaataatggaccccaaggcatgggttgtcttttggtttggtgttttggtatgcatgcagtcgccggttttgacttttgcatctcttgtgatcaagtcgatcggctatactaaccttgagactatgctatatacggctccatcgggcgctgttcaagttgccttcctgtggatcggtgtcggcttagtatttatcttccctaatcagcgaacgctagtcattcttgttcttattatcccgcctctgattgggactgtcttcttgctgaagttggacgtgactgctcaatggggtcttattgttgcctcgtggctggtatgtatttctattgaccaggtcattcttccgttgctaacccagttttccgcagtcttcatgcattacggcatccatgacaccacttctctcacttgcggcttcaaatttcaagggaaataccaagcgcgctgttgtgaacggcatgtttttcattggttactgtgctgcctgcattgcctcgcctcaactatggacccacagccctcgttatacggagggtgtgataacatccattgtaacatggtgtctgctttttgtggttgtgattttattccgcttcttgtgcatccgagacaataagcagcgtgataaacgggctgccagttcaggtgttgtcagtgtggatgaagaggtcaaattggacgaaaatgggttgccacagacagatatcacggataaacaagaccgacaatttcgatatgtatggtaaataattgtttatatttgtttggaaagtattccgaggaggttaatatgatatttggcttgattttccgcatattataaacagtaggatcccagatggaacaagcaggccaatacacaaagttatgaagagaacacctttcggagttgaacttggtcattgttaccctgtgtagcaatatcatccttctaccttgatcaaccttaatatatgcagggacagaggctgtaacaatttgcataccatttttcctctaggagcacgccttgatgatatcggccgcacgctcagcaaccgcatagacggtactctgaaggtgaccgcaaacctggaaaggcatgacggaagcgtccacaacacgaacattcgaggttccgtaaaccttcagcgacgagtcgacaacaccaccaatctccttgggaagcatggcagctgtggtgatcgggtggaagtttgatcggtctagtcaaataaaaggttaataataaaattccctccacaaatctcccagaaacgcgaatgatacacgtacattgacctttgatgaaatcagcccagccctcatcttcagcaccagcagcaacagtagaaagaccggggctggtttcagcaccaaccatatcagcaaatggttcagttttgaaaatctcacgaataaaccgcgccgcctccacctgagaatgtagatcaaagtccagcatgaagtacttggggtcaatgatagccgccgcggtggggtccgcggaagagaggtgaacgctgccgcgagagaacggaacagacccccagtattcgctgctatacgaggttccagaggccgacagcaggatctccgcaacagggataccagatttaaagatcagatcccactggatcttaaagaagcggtatatgtcgcgggctttggtgatgttgccattggcggatgcaacctgtgctgcataagcgggaagctcgcgaagaagctcggctccgagcgctgtggagttggggaagagctgggctgctgaggggtaggcgacgtagtcggcactcttgttgctgctgtaggtttttttcgagtcgaactggagaccattgttcatttggtcctgcaggttttcgccgacagttggcaggttaattttggtggcgattccgtacttggaaagaatgctagtgagtgatttttggttagccttgataagatgttgaacggggaggtgttatggttactttgggtttccgatgccggaaagctcgagcagaacgggagatttcaatgctccagcagcgaggattacttcacgagtagccttaaccacggtggttgtgccattggaaaaagtgacctcgacaccattcgcagtgacctcatggccattcttccaggtaatcttgttggcgtgtgtgttgagccagacaaggagattgtttcggttctggtagggataatagtaggcacgagcagcatcctcacggatattgagctcagaatcaaccgtcttgggatacaagctgtatccaaccatatctccgccattggggtccaggttgtactgaacaggaacatcaaggttctgataggtagtgttcaatttctgagcaaggccgtcgttcaactgtgttgaagaccagccaaccttcagtggtccagtaaagccgtggtaggccggatcaaaagcaacaccggatccatccaagaatgggtactgtgccggatcttgcaagtgttcgccctttttgaagtaggggagcagagtcttccagttccagcccttatttccgacggtctcccacgcatcgatctgagctgcctgggcacggaggtacgccatgccgttgatggtcgatgttcctccgagtgcctttccggcacgtattgtttgtggggaaccaccggcatattcttgctctatcgttttgtaggcccagtcaatgtcggtatcaaacgctttgccgtatccgagagtgtcggtcacatttaggttgttataaacggagccgccggcttcgatcaccaggacagtggtgtcctttttctcggacaatcggtttgcaacgacgaggccactggtgccacctccaacaatgatgtagtcgtaagtcgactctgacttttgtgaggtgtggggaactgcaaccgctagtggaagcagtgcaaggccgatgaggctgcgcatgattgatatttgattctaagggaggagattcaatagtgagtagcctgagcgatacaacgaaagctgtgatttctttaacaatttgtctcgaggctacacggatgttttatacttcgggtcacaatatgatttacaagcatcgtggtccattttgtattcaggaacatggcggaactctttgtcagatcagactaatcccaacacgcgatctgcgtgtctgttactccggaataaagagcaaaacagaagaacccactgtctaccaggtatcccattcatcccgaaaccgtatatctaagtctaagcctaacgggctgaggccgaaatgagaagtagacccttctaaggttgcaattgtggatataatggataatcttagcacctgaaatctccgtggttttcccgctatagccccggtaggactattaaacttcttgtagtagtatgtctactcctatctgctgccaaaatctacgccagcagatccactcgatggctgcattaaccttggaaatcttactcattcttagtcaggaacaaatatgacccaccttggaagaacttggattgataatcgtatgccgatcttattcagagtttcgcactgcctacttctagtatatgcctaagacaaggtaaccggaacccggcttcgtgtttcacttgcttctacaagctgtttgagtaaaacagatggggatactatatccacgggctgtgcaatgccaagtaatatcctatgtctagggtcaccatgctcaaattgactacttctccgattttaagggtccttttagagaactttaggttgtactaattttcatctgataaaagaaaccgatctgataaaagagaattatgaacggcggtattctcggcccgtaaaatgtcagagtctccgagtcagccgagtggcgtcacttgtggatacaatgtggagatttatgtcctctgccaatgtacaaagtacaatattgtggttgatgaacagtctatagagaaacagttttcgacactaggcatcgacaactttcttggaataaactcggctctaacacattaccggccttgcatgattcacccatttgaaagagtaccttttaccaggtagaccatacaaaaggtatgtaaatgttggttttcctcaataatatcatactggagacttcattgtgagaattgggccagtcttgacattgaaggcataccggcatctccatcttgagcctagcaaatatgtgtccataaccgtcatatgattccaacccaaaactaaggaatatgtacaatatagatttcgattaatcccgtcgatcattgattatcatccccaggcattaaccttaaattagacgagcatatcgaaaggtaccgcaggtaaaagtggttgtgaaatagtcgaggtcatagggaatcgtgtttctgacgttgctgagctctacattgcaactgagaccgtatttcgaaacacgaagaacgtgaggtatgttaacgatattcaatttatattttacccactaattaccgaaaatatatattgatcatgttccctcacaatcctaccacgatcaacaaacgaatcattataaaacgacgcgaccttcttaggtcaaggatgggaaatcctaattctccacttgactttgatattgatcacttcccaagggtttgcaactcgtgctctccgtcgtatgaaccttgctcccgcggttcaagggttttacgcttagctagattatgggttaaccctaatataagttcatttcgttcgaaatcctataacctggtaatctctcatcgactgacattaattaaagatgcattcaggcacattttgagcttgtgaatgtcttcattcatacagcttagtagacctatctttggccgtttgcagagaagtttctcccggcttctagagcatcagtgttttgttccattgtcttcatggagctatttagaaggcttaatgaagttggagaatcatcaataacaatatttactcagttgatcgcatcttttctggagctagccaagctacgagaagtcatccttgatgttctatgtcgtcaatagtctggaactcggagttgtcttattagtcgggtaatggagcttttaggagattctaagaaaatctatcgaatatgaagctcttgtcttttgaagatgtatacaacataggcaacatccagagaaacaaaagtattgtgcattgttatcgcgtaaaaagaacgtattgccggatatccgagagctcggatatataagattctgtgacccaacatcattcaatgaagaatgacttcgttcccgatttttccgacactcatatatcacgagcactagaacggcacttccaattttagtgcctaagagtctttagcgttcatcttgctgatatgattcaggccaacttctccgaagccactgttatcttttgcggttcatagtggatcaaattgataggtgttggctgtgaattttaaccaggccaatcatcatcaaactttgcgtaagccccggttttatttttaacgccataggactggtggccaaaaaggtgggagatgggttcaaaaagaactaccggcgactcaaatcttccatttcatattattcactccttctcccaatacctgaaaaggttgtataaagattgatcatgggggccgacagtatcaatctaaagccggtcgagtcggcgcgctcactcgcttcgactttctcgcccatccacgaggtctttttcgttgccattgtttgcatgggtcaatttatgacacaaaccaatgtcggagtatgtctttcgccgcttgatactgtcggtgatagctttggtatcgacgatcccggcatcttgagctggttcatggctgggtactctttgaccgttggcacattcatcttggtgtctggccggtgcggcgatctgttcggttatcgtcgaatgtttattattggattctgctggattgcgctttggtctcttgtcgcaggtgttagcgtctattcgaactatattctctttatctttgcacgtgttttccaaggcatcggtggcgcattgctgatgccaaacgcattggctattcttggagccacgtacccacaaggaaagagaaagaatatgattttcgccatcttcggtgccgctgccccaaacagtgcccttttgggagctgtcttcggcgcaatattttctcaattggcttggtggccttgggcatattggacccaggctatcgttgctctctgttgcgctgcagtaggcctgctcgtgatcccatccattcatcacgacgctaagtttgagaaatccttcttgggcctgctcaaagctctcgatgcgcttggtggagtttgcggtatcggcggcctagttcttgtgaacgttgcatggaaccaggggcctatcgtgggatggagcgagccctacgtgtatgtccttctgatagttggaattttgttgctcgctgccttcttctatgtcgaattccgagtctctgaaaaccccctcattccgttccacgcattcagtcccgatgtctcgtttgtccttggctgtgttgcttgtggctggggctcattcggaatctggatctactacttctggcgattcgaagagaagttccgtcagttgactcctctcctgacctctgcccagttcgttcccgtcggcccagtgggtatcatggcatgtgttgtcaccggctggctgatgggccgcatgcgccctgcgctgattatggtgttgtcgatgactgctttcacagtgggcaatgttcttatagcaattgcaccggtgcaccaaacgtattggggactgacatttgtttgcttgttagttaccccttggggtatggatatgtcgttccctgcagcgactctgatgttgtcgaatgcggtcgagcgcaagcatcagggtgtcgctgcgtcactggtgactactattgtcaactacagcatctcgctgagtttgggattcgctggtaccgtggaagttcacgtcaacaatggaggttacactcccagcgatgtcttgaaaggatataggggcgcattatatttagccgttggtcttggtgggctggggatgtttctcagtatgatatacgcattcaagggccatcgaactgagagacagccggtggaagccaaaaacgaggaagcttaggaataggctatcgtctagaagtacgtaagatttaatcttatatcagtataatatcagttaatcacctacaacgcggtcaagctaagcttttagcaaaagtgagtacaatcatatatgggatagacgacaaggggtaaacaaatgagaagagccgggctactaagacttgatcctgaaaatgaggctttattgtcgatatcgtggagtccactggctccataactcaatgccgcacatgaagtattctagacctttgatgtacatctctagttcatgtgtcaagccttccatggtgttgtgtcggatttcaacgctggattgtttgaaaacgagctccaattcccgacaatagctatacattaatcgtctgcaggctgtatatggtagtcctgtctcgttcgcaaggatgtagatggcggagaatggctgggcaccatcggttgggttttcctggtatactttccattctcgctcccagctatagatatcattcataacactgacatgcctaaatgcggtgctttccaaagcggctgtattttcaagtgcggtgggagtgagatcgagcttggcaccaaatctaatgagggctgtgtagagtctaaatggccgtcagtactcatcaggaatgtctgaaaatgaacagcgacagtaattcatacgttttgcccacatctgtctccctgaatttgaggtatgacccgagagtgtttgctgtggttctctcctgggacgtctgggcttgcagaagctgacaaaatccctgggcgacatcatttgccagaacctcgtccatacttcgcatggccatgacagtatcgtgaagcatccactcaagacagatacatctgtctgggctcgctgctccaagggcaactttcatgagtcggtctcgatacgacagcatttgcgtaaaactcattttttcaagttggtctatctcgagagtcaataaatggccgaacccagtctccggctatcagaactcaccgtcaattagtaatgacaagtaaagcattttgcatgtcacatcaatgcgatcatatagcgtcaatgggaaaaagtgactaaaggcgcgggataacccaagaccaaggaacccctttttctccttctcactagggaaattccaattgtcgccaaaataaggctcaacctgagcttgaatcaattcccaccctagtggatgggtttttgattccagttggcttgctgggatcgcgcaaggagcattttgtgctgttgagtactgcctggccgaattggaattgtttgttgagtagagataggatgaaaggattggccgattgacagccaacgccactttacgtcggcgttcatttgtcaatttcttccagatgcatatcctttgaatccgatgcattgcaacttctatcaattgcatcagtgaggccgggctttttggttggcagttgtcaatctccacaacggaggctgcacacatttacgcacggaccaccgaaatgtgatgtcaccaacatcgatcaaccgtgggcctgccactcttcttttatctctatttctaccccaagtttgcttcgtacaacatcctaatatttgtacttacaacaccaatcgacactctctccttaccatcatcctatcttgaaggctgaattccctattagctctatccccaccaatccgatcatcggcgtttgcaagagaaagaggccaagatcttcgtgcatatggttctagcttctacctctatcagccatcagagctctctgcaggtggccctacgacgacttagtgcaatcaaggtagatagtggaagtctctcaacaaaggttgtcacaatgagcgcaccatcaggtccgccacgtgccccatggcgcgatctccttggctctcatatcgagcaaacacctggatgtgaattcacaattgcaacaattggctacaatgctcaacagcatcctgtacctcgcctgcggacttgcgcctgtcgtggtttcttcccagaactcgagctcaacgctaagggccaggaagctatggatcagcaggtggaaggcggtgctaatccacctgtattcgaaagtgacatgctgtcatttaccactgatgctcggatggacaagcttcctcaactggagtcctcgggtcatgcgactgaggttgtattctggctgaaggacctcatgactcagtggcgtgtcaaggggacggcatatgcaattggcaacccaagtggagaagatacagaggaagagaagctatcccgaactgagataaaaaagggattgagagtaaaggggaatactgacagtgacattgcgaaatggacatgggaaaaggctgtcacaaagtattttgcaaatcactcccctatcgcaagaggtatgtggtctctatcttgattcttgggcgcaagtgctttatgccttgctcttatgccgattgaaaaccccgttcgcctgtcatcgcctgctcatactgactgggaacctaggtttcttccgatcccctccccctggacaacctagatcctcaactcctagccaactagatctcaagctaggtcaaaaagttctggaccttcatgaccctgttgcacgggcaaatttccgagtcgtcatcattcggcccgaagaggttgagtgtttagatcttactgatcaagagaacggcaaaagatggaactggacgttgattgacggaagcgatggttctcggtgggatgaagccgagttgtggccgtgattctaccaatattgcaaagacacttgttctcctggataagttgtatccaaaaaatgtgtaatcgctgtcttattttgatatttgcatgacatacgttggatgttttcatcttaggttataagggtgtatatctataggcttcaatagagtaccaaaaacggtcaagcgaaatgttggtagtttgcataggatctttgtttgagcagtgtctagtgctgaaacttgcttgacctgagattttgttgtgctttctggttgtcgcctgcctgaaagaaccctcacttctaccaacttgtcacaactttcattcaccatcttattctatctcattagcaaaagtaacttccctcaaaactgatcccttgacctgccttatcccaactaaatactgaccacggacacgttcatatagtgcctgatactgagatgcctagcgataaccctgcctgtgctgactgtaaggccaagaagaagcggtgcattcaccgtaaccaacctgtgaaggtcgcgaaagtcgaagccgtctcagccagcatgtctgccccctccgccaccgctactgttctgacgcctgcgtccactccagtccctgttgctgttgccggttcctccaccagagggcgacgtaagaccgctgatgccacaacgaaggtactgacaggtctgccgttgacttctggtttggattgtcgtaaagctaacacacagaacataggagatgagtcccgctcctgccgactccagcgacgagctttcttccgtgccctcggaggccgaggagaagccgatggccaataaatacaccacgcacagtcgccgtgctaagacctccgccgcctccgagaacgtagccctggcccttgacctctcgggtgattctcttcaggccgctgccaccatgtccgtccaccgtgtctgggcccgcgaacttcgggacaacctccaggaactcgagaggtgtatggaggccttcgatgaagctcaccgagctaccatggcctctgctcaggctatccagcatactgtcgacggctggattcagacctgggctgcttctggtcattaagcattcccaacgttcaccatcgcaccattttgtagcattggaatgggtacttgcggtcatttgagatgttattggggggggaactactccggactggttctcatttgagaagaggaaattcttcggttcctgatatagggcgtgctcgaccaggtttggacaattcacgtggctcggcaccgattggtttctattttggtatgcctgcaagcatccaggcctatgaattcgacatgtatgctccgtatttgtaggctgtaatgattcgcatagcgcaatcttggacactagaatacccatcaagatttgtgtgtgtgtgcctaaacctagagacctcaatgttgtatgtacaatatactgagtactccgtagcatttttcaaaatatttgaaagttgtcgagtccgagggggtcggggacagaagtacttggtggatggggtttttacgatacataccagcagctacagcctatcaatgtgggttcccccttccccccccccccccccccccccccccccccccccccccnnnnnnnnnnnnnnnnnnnnnnnnnnnnnnnnnnnnnnnnnnnnnnnnnnnnnnnnnnnnnnnnnnnnnnnnnnnnnnnnnnnnnnnnnnnnnnnnnnnnnnnnnnnnnnnnnnnnnnnnnnnnnnnnnnnnnnnnnnnnnnnnnnnnnnnnnnnnnnnnnnnnnnnnnnnnnnnnnnnngtcccccctcccccccccccccggtctccaaccactgactctcccgagtcttccgcggaagggatcgtccggcttccaatagcgtgatagtgtgccagggtctcaatttttagtgtttgtttttcataaaacacaggtgcttttgtacaatgtaaagtccccgaaagggcacttacgtgtcatctcctaccaaaggtacccatggatatcgacaagactattatttgcctcttctattcggcctggtctgattcgactttcgacagcaatctccccatttctgttgccggagactcgactttctaaggatgggcgcttatacagatcttctgtcatactgattatcatgaccttcttttgagcctatgtcaaaacgctaccacgtctaacgatcaatagtatacaacatagagcaagctaaagtagggctccgtacatttggtcccttgaaagcaatactagtctagtcagtctgcacaaatagatactaatacatgtagcaatcctacctcaccgctcaagtgattcacctacaattcctgcaggattcctatcaaatacatcacataggggtgtcttttccgtaccgaaactgcctagccccatataaatctttttacaaatcggtacggcccaccgaacacggtagttaccatactggtatcatacggctcttcgattatctcaatttccaaccctcttttctttcccttgtgcctattcacttcccctctccagactctgcttcaccgttacttgatttttttaactgcagatcctatccaacgcacagctcattattgaggggttcctaaagacgccttctcttccaccctaacccacacccgcaccgcgatctaccttctccgtggcacaactttgtctcttcgccgtgaaccattacgattctggtcgacttacgatttacgacgaaacgaacaccggaaacacccgctcaaatataatactttaacgcttgattctttgatttccgtgaaagcgtggcaacaccggggattcagcaatcgaatatctgttagccatggcatcaatggatgctctaggggccttcacctatatgagagacaatcttcctgcatggatcacccgcgtctcagagcttgctacacacacccacaagagacacgacgagtactctgaagcttacagacgccacgtaaacttcaagccccgccgacggaaaaatagctcggtttgctccattcataccgatgacctcgttccgatcgcacaaagaaagagtcccagcccagaacctgtggtagttgggacatcgcaggatgcgcccgagcaaggccaacgttcagatcgcaagcgcaccacagatgaggctccatcagtcgagtccaatgaagaatacaactcgttggtaagcacacggcacaatgtcatcatcgagtatgatggccatacacaacaaacacttgaggcaattgtacgcgatatcggggtggccaggaacaacatcagacgagggcagatgtcattgatgccacgtacagggctgcgagcgagcttgttgagcaaaggcgtgatgaatatgccaagtgcactaggacagacaggcccactctcttgtgttcgcagtactcgactcacatctgggcttgtcggtatctccgggaccagcgcacttcggagagactccccttttgactatgcagacaagcagctggaacttgcccattcgctttgcgagacggcatcttaccaagtccttcgatctggcgattgtggaacggaactggacggggtcgaggagaagttcaagatgctcctcgcgacggctatcaacgagatcgaccgtatcacggcagaaaagaagcagcaagaagaacaggagcaacagcagcaagaagggaccgcggaagagggacctcccaaaccgccccctaccccctccgcagcgcgactcgcaatggttgcttctcttgcaatgaacaagccctcgatggccacggcaggcaccattgaagtcgatgataactcgtctctctcggctgaatcgattgatctctctgcattccggtcctctcggatctgagtgtacacacgggcagccagcacttgacctcatattagccatttagcgtgtgttgaaccccttccagcaaaaccattgcagccagttgataccttcgatctgttgaggccatctctttctctttgattggccttggttttttttgcctttctgcatctttgattgcgatctgatttgtagttgcgggggcgcatacgattacaccattcattcccttgtttgcggtccatgttctattcctccttcttactgtcttttgatcccatttttgaatattgctgttcttgtttaggatacatacctcctgcctgtctcttgcatcagctcatgactcattcccaagggagcacggcgtttttatcactatttatgtgttttcttctgtggcttgagtttcttcgacctctctgcgttcattacaccgatcattataccgatccattctgagtatatatttatggcatgaatttgacttgttcgtggaatttttagctccgttggcaaacttgcatgcatgaggtcctatgcaacatacaacaaagaatcgtattacattcaaggcgtaacggtccggacattccatgaccgattgagtccagttccaccaataatgtggaatgtactccgtacaatgacttccctgtaataatcccatattcagcctggaatgtcccaatgcatgaccgttgccgttccctgtctcggcacggaaagacaacgccatgcatgtcttttgattgaatgattcgctaagcaagcgaagtcgccacaaggacgggctccgttgcgggtccgggagtcatcgagtggttgatactgtaaccgtcctaattaagtataggcttaaggtggagataatgagtatgtaggtgggggggatcaattctttgtgcaatatatgttgtacatactaactatcatctgcgagtgcattgccgctcaaagcgtctttattgttccaagctgcggattacaatatacgtatgtacgcatctttcaatgtgtcttttttgagaggaaattcaattaaaataactatactccgtacaatgtactaaaaaaagtccctaatctagccatgcgtgcgtggacatgatatcgccatgcatggtctagacacaattttttcggtctatcatggatgtagcaggtgaaatcataacaacatatgttgctcccacctggcaggatgtgggtgcagggatcttgcttctcgaatataccaaagtacatacatacaatgtaattatattctttccctctgattctatggacttcggcagcctctatccctaggtctatccctaggtcctccttgggaaacagtggttcttttgagcataagctctaaagatagtgaaagatctcaatccaactaatcaaatagaaatataaaatgctatatgcttatcatcagagcggacacttgattcttatgatattaatacatacagtactccatacagtaattcagtatgtattgtacggtgtatagacctcccgctcgcccgtctccttgccgatcaacacgctgtcaactttaccttccccttttgggtggcacggataattattccagttgtttttttcatgggacaaaggtaccatgcaggagagggggagaaagacaaatttgagtctttctataatagcattgttttcgaggttctgctgtgcgaaatacaacatactacaacatatatcgccgtatattcagaaatgcgtcctacacctaataggagatgccgcaatagatttacagtctacatagaagataacccaaattggtatcatggcccccacccctactagccggaattggcgggtgttaaaggataagccaagcaagccaacgcggtgtcctaccggaagcccttaattaatcctgggaaaacaagtatatttccatcgcccttggcggcattggccctgtctctcttacttggtgctggatttacaaggatgtgaatcaaggtgcacatcctatagtaggctcctgccttgtttggaaagaggcgattctactagcttactatggaagattcttctaatttccattacagttgtctcggggagatgttagtacttctggatgtgatgtctatattgtggcataatcaaatctcgcttgtaagaatactccgtggtgtgctggtacacagcacaaacttctgtgcgggtattcaattgtactcgaaagaagcttacggagtacttgaggtgaaacaagatattttgggggtttgggattagatacgagtaaatgacagtctagaactagctgtatcaatgacctcggtctcgacaaaagtacctacatgtcacatgtgcacaggatgtacttttgtaaagtacgaaagaagattgatcgtatctacaacttatgacaactgtagtgcctacgatgtactgtgtagcgcaagcctcggcagtagagagccagcttatttattgatcgattgataattctcaatccggtggccgcatcgcgatttgcaatagatccgagaagtcatttacgatatacgaagtgaagtgccccatagagaagaacatatactatatattcgagaaaggtgagcaaccttactatagtaattacatagaattctttacaaacccaggagatgaatgcttgatagtcaagttgtagtttccgaggaagctattacccggttctagacgctcttcttcaagcccaacaaccatgcaaaacaggcaagaaatccatttaaacattttgatattaaaaataataatcaaaaatagaacttgatgcattgacggggaatcgaaccccggccactacttatcaacacttcagggaagtatgaaatggaagagtagtattctaccactgaactaccaaagctgtcttattggttctgtcgccttattacgaaatctggcatctaaaaagttgaagcattaattccctagttttatagaactacgaggtaaaatgatatatataaatttgccgtaactagtaagtgtacagtggagtgctaagggtaacccacaacaatatccgggttcataattgcttcttaaagtcagcaaagtagagattgaccgacttgacctctagggctggccctatggaatgcgcctactgaagtgagaagactgaggatgattactgagctgcgaggactggaactttaccttcggagggccgcacatggaatgtactcgattgtgtaggggtggtgtatttcgcagttggaagtgcggatgacacactcactcactaattgcatctcaaccgtggcatgtgcttggggaattcgtgtgatctagttagatcgacgagaggcgtgtacaaaggaaagagcctgcgctggaggtttactcaagcaatctacttcgctgcgtaagatcaagtgctcgagctaggtactcgatgtttgaacaccccagatttgattcaccgtgtttctctacaagaggaactacaagcggatcttacttaatgggacattttgatgctgctggtgagccggggtaactcggcgaggtattctgtataaataggatgttttggcagcgtggatgtcaaggtacacaaccatcactataactgtaatttgacatattttgattcagtatcattcatgtccaatcaaacatcaaacgcaactaaacggatatcatcactcataaccccttgttccttctattaacccattgaaaatgctcaacatagcccagccctggaatacagacggtacgaaataagaaaaagaacaacataatcaagtcacaaaaagcaacatctcgtctcacatctcctcgaaggcacaatcaggatgcatgacgaaaaggacctttccgtcattttgggcgtcgtcatcggttccatccgtgaggccagacccggagatacgcagcaagagcttgtcctatagagtaactttattagtgacgttgcttgatggaaatttacgaatattgccatagcaaaggaagatctactaaccttaaccatgcgtttcaagaccttgcctgccaactcgcgctcgcgctcgtaatcttctttggtgttaagttcaccctcaatttgctccaagtaccagagtacaagatcttcttgctcgacaccctcgcccgagttcacctcatcctcatgtacccgcctgacaatctggttcaggatcttggcgtacttgtcataggtgatcttggtcttctggcgttctggctgggcagcagcttgagcaggctctgcaacgtcacgcatagggctgtcgccatcattatcgccatcggccatatcctggtcttcatcgccatcgttggtgtgagtaggtacatcatcttcaatctcaacatcatctttctcgacagtcacgatactctggcggagaagatcgtatgcctcaatgacgaacttgggaactacctcctcgacacagttggccttggcgacagcctcagacaaacggatcaaagactcgagctggcgaacagtgatgcggtatgaagagcggcccacgcctccctgggcgtcgttggagcgcagctccttgtatttctcgaccagcagtgtctttgcctcctccgtgaagactgggcggaatgtgcgtgcgaaccggatgtagcgctgcagttgttctgtgctcagctcgggctcaacagcctcatcgcggtacatgtgtacgttaacaatgtggttggccaaactgcggtcaacagactcctttggatcatcgcggataacaaagaacacatcgaaacgactcataatgggagcgctaaagttcaagttgttccgaagagtttgcttcgggtcgtaacgaccattaacagggttagcggcagcgagaattgatgcacgggcattgagagtagtatggataccagccttggcaatagaaattgtctgctgttccatggcctcgtgaatagcgacctgatcggcgatatccatcttgtcgaactcgtcgatggcacaaataccaccaccattctataaggaacatgtcagcgatgagcccacactcagttggagccacatttggaacataccgcgagcatcagtgcaccggcttcaatggtgaactcgcctgtctcgggatccttcaccaccgaagcggtcaaaccagctgccgtagaggctttaccactggtgtatactgcacgagggtgcagtgagcagacgtatctgagtaatcccgtcagcaagcaatgtctacatatgaggagtgggcaaaacttacttcaagaactgactcttactggtcgacggatcgccaacaatacaaatattgatatcaccacgaagtttcatgctctcaatcgatgtggacttgccgacaccaccaatcaactgcaaaagcagacccttcttgatttgacgatgaccccaaatcatgggggcaatcgaatccacaagccgagagtaaatataatccgagtgcaccagtcccttgagatcctggacttcagccgaggtaagactatgtaggaaagcttcttgggctgattcatctccaaggtcatcctcctggttttggttcaaagaagccagaatattatttgactggccactcagctgctgctctggcttttggccaggagtggttgtgtctggagtaaccatgcatgaaaggaaggccaatcggtaagtcagatcacgtacgcccagagacttcaatccagagactccactaccaccgacctcgttgccccggaaggagttgttatcgcggacggcctcagggcgcacaccgggaagacccaattgactgacatcaggaacaacaatcaaggtgcctgtaaatacgcagcgttccccagccttggcgcgatcaaccatctcaccacgcaaaatgacatccattgtgcgtggcatactaccagtcgggatttcgtgcgatgattcctggagcttgactttttgccaatcgacaaatgtactttttccgatatccagacgccatcccacgcggttgccgcaggtcttattggggcaatccattggctccgtatatttgaaagtctgctcaacatttggaactactgtcttgcaaccttcgcagataaaagttcccagtgataattctggtctgacctctgaagttcttgtgacagttccagagacggaaagcaattttccgatctgattcgtccgaagctgtcgcagtctggaaaccaaaggtaggttataaaatgcaagggcaaacattttgtcggtttgctggtggcgagttttctcgcggatctgacgctcgaggtcgggattatctgaaactcccgcatatgctgaggcaaccgaggtgctggctcgcgaagaggcgctggcagtcattcggtgggagacgaagtattctggttcgtacttggcgatgagattgtgtagtcccttagtaaggaagggttggaaccgatagtattggctggcaatggcatctgccaagacgggattatggatgtgcgtgaaatcaacgtagagagttgacagctcgaattttttcatccccttaatctgagcgatataatacttgtcactaagaaactcccctgatgagggcggtgcagaagacgagggttcgtcgatgtatgactcgagcagctcttcaaatgcctgctgaactttctctgccgcctcatcgaccaccggcggcgccgcaggggcatatggattccgcatacggctgattgccgaacttcccgctccgacgacttggtcatctgggaaggcattcatatcactcatagggccattgctttccgagcgccgggagctgggcagattatcggagcggaggtttcgatcgcgagaaggcgcagagcccagctcggactggatcacggcgtcgaaaagggaagacatggcaatgagctgatggccttagaatggccaatgtaaagaagggtattaagcttccacgtgtgaggagaaaaagggaaatgtggagagatgatatcgtagactcagtttgctatcttagtttttcgtgggtctcgttcgcgggtctccttgggcaactagggcgcgacgcgaacgcgtattcggaagaacagttgatcctacaccgacgcgttaagtggtttcattatgtaagtatatacgctaacccatctaggcagtaggtccttcatcttcactacaaataacattgagtgtctgacctagtgtccccactaccgctcatatcaggcgtataaatgtcaagacccgtatttttcgaggtcatggcctgactgctggtttgaaacatgttcatacctatgagtgaagggcggacagaccagcatatacttggaaactgcaggtttggccggtttggcttgttggccagaattatttcgcagtcttaatatgagagttgtgaatttaagtgggtcacggtcatatatcctcggttgtcacttattgtgtggaagggagtatcccaaatccctacttcatattctggagtacaacgtaatatatatttgaaatgaaaaaaagttagttttggtgtcatcagagccaaaatagttgcagagaaagtaaagtcaggtcaataatgtaataccgttctgacgtgcatataaccattttaactaatactccgtaccccgtcttggaattaattaaatgccggtttatccattgggtaaatggttgatgcttggcgcttatataagagcttcttccccccggggtgcaagtcgagcatctgaaaccatcctattttttttccctccccgggaattatactcccctcgcattgtattgcctcgtaagttagactattctgtgctagcgtgctttccttcatgccctttcttccgcgcatattctccgtgaccgtctgacacttgtcatgacgtaggacttttgtgtcttgcgatggtttcttccaaatcccgagtccttggctggaggaatcttggtgactatcggtcggttatgcagttttgaccgttccattgtgtcgacaaaggaaatctttgttttcgcagctcgacatgtctgagaacgagcgacggttagtatcgacactgaccaggcccggcgctggcccaccgttgggcccgtctgacacggatgcatcgggtatgccccctctcgcctttacgagccaatctcccaactcgcatgcacaactcaactaaagcttctcgtatagcaccttctgcctctggccatggctcccaaactgccaaacccggaaggcgccgacgcgccgctgaatcgacgaacacacctcccaagaaccaacacttctactttgtcgatcagaactcgtcatccaaagaaaagcgtgctcatgttatgcgccaccatgtacaggaaaaaaggaaacagcgcaaaatgtcgcatagcacaacccccacagagcacatcccagattatatctcatatccggcgaagaaagaggcagaaactgctgaaaagactggattagagtcgcgctcgacagctgcgccaaacttcaccaatggggaaacttcggtacggaattcgctttcctctagtcaagtacttaggccacagccaaggctagactgtctaggtgtcggcttagcctgcaaagcatgatggatctagatgctaatgccatggtgtgtcacagcttcaaattcgattttcaaatatgaaaccgcaacctcatgctcctgcgctaccacccattggctcgccaatcacgatactcgatgcctcgcgaagggatccgttttctagtctcccaatggaatacgataatagcgatattgaattggctgactattggaggaacaagttgatgtactggtccggacaaaaccttcacttgaaaaaccagattttccggacggccatgggacaccctctttctttcaaggcagtagttctgtcatactgcgcgcggtggaaagcacagctgtacggcatgtccgacagcaccgaaatccagcgccatgttggtcaagccgcgaaaatcattgatgacattacctcaggctcggtgctagtcagagcggatgatcttgcaatggccttgggtggaatggccttacacgaagggcgcttcggcagcaaggaactggcccagatacatgtaaaccgcgcggtccaggtcatgcgaccgcgaacaggaagcaacaagcccgtggaggtgtttattcactacatccgatatctgatgatgccagaaggccccgatattagttttaccgaacagcaatggctgctcacttttttgcgaggagccgaagatctcatgcggcaacacagctcccccgaatacctcctcgaagcaccccatagactcacggctttccagatggaaggtcctctattttccctgctgtctagtgggccgcggccctcccaagtgccgcacgaatctcgtgtatatgtggttcgcgatgcgcatacccaagaggtcagccgaacggcggccctcatctatattacggccgcactgtgggatttccagaattccccaaataagaccgaccggttccttcagtttttaagtaccacgacaaaacagcaccacctcgatcgtgatccagcttgcgaaacccttttgtggttgctgctggaggaagcgcatgattctgatttacaagaccccgaacgcggatggtccactggcgagctggtcaaggcgcacaaacggctacggcctgacctccagttccagttcaacgagattctcatgagcttcttatcttttcagacacccattcgcggtgtcaatgcgtttgaagaggagcttcgaaatagtttacataattctcaatgaccaatttttattacttggattcgagtcaacgcagctactctgtagttacaattatgtcgacaatggaatgtcttggcagtacccgagtaccaggataagcctaagtgtcattgagttcaccgtagtggagatcaaggggaccttggaagctccgctgtttgccccggttccagttttccagacaatttgatattcttcgtagtgtatggatatattacgtaggaaaaaaaagtagctatgttgtacacttggcaaagaaagatcgggtagctgtggtgacgcgatacgccgactacatatgcatttggttagcgttgggtggatttgctgtggagatagttacctcggcgttacgcatgcgctcggaactctctacaacatactaattcatgaagacccaccgtgacttttgagatcgatcgtgatgcaatttgctgggctatggctctaacactacaatgtggtgtatatcattgcagtattggatcaatgcggggcccacgattcatatcgcaactaattctctcattatgggatgtattaatatggcgtaggaaatgctgcttttttgttatttgggggcgcagcggaggtttcaagttgtgagaatgtcaacccatcttagggctcgctaatttcacctacaacatggttactaatttcgacttgccaaggggtttcatgcaactctcggccccactgaacacagattcaggtcaataggggccaatagtgcaatccactatccagccttagcgctctctgtggcaaaaaatccccatctatacaagagtgattggatccagcgcaaatatgaaatgatcattcgacgatcgcttcatggcttatcgaattggcatgcaatgacacgaccgtaatgatattgatagtcgaaaagcagaaagaaagaaagcactaacccagaacaacctgcatgtgcatcgtttgggactctgatctgcggagacacattaatattactacggagtacatacccctggattctccaagggcaatagacaaattccctaaattccctatgacctttttccatttccgaatatgtgcgaccgaggattctgtacggggtacagagggcggagtatttccaagaagtttgttttatcccatagcatcccttacgcagttacatccctgctgtcatgatcgccatgtatgatcagctcatttatcttgaataactgtggctgtggctggggttctgtggcggacatctccggtccgaggctggaaaaattcaatctcggattaaaaaaagatcttacgaggtgattggatcaaagaatgggtcattgattacgacgaggggatctctgctcgcatctcgaccattgagcgaaaagtctggattgcccactcgccacccatggatggactgtcgctagatgtgagattaggttcgattcctgggaaaaaaaacaagaaaaatcacgattgaaaacacaaaataggaaagtagcccaaataacaaaaaacataatcaaagattgtccaattacgtagccagatcgcagatcctagtccttcccctccctgctggccatggatccctactaaactttaagcttctctcggtcttttccctcctatctttcatttttctttcacacttggggaacccatcctcccctcgacacttcacacccgtggattcgaagagtgttttggacattttgaatacacctttgcgaataccttcacaatggcccacgatgccgtgcactggctggccgccagggatacggtaagctctgtcgaacacctaggtagccggtcctttactcacgatactagagcgacgacccgcaggacaccacgccgacactatctggtctgctcaccaccctaatccctgctctcgtctccttcgttgtgatggtgttgctcttcatcatcctgcgcaagagcaatcgcaggatgtacatgccgcgaacctacattggatacctccgtccctggcagcgcacccccgattctccaaccggatcctggaactggatcaaggcgatgtaccagttacccgacacctacgtcttgcagcatcactcgatggacgcctacctcatgcttcgcttcctcaaactgtgctccgtgatgttgttcgtgggctgctgtatcactttcccgatcttgtggcccgtcaatgccacaggcggtggtggaaagatccaactgaaccttctgagcatctcaaatatcgacgagactcaatacggtcgttactatgcgcattgcttcctcgcctggatctatgtctccttcatcttcttcatgataactcgcgagcacctattttatatcaacctccgccaggcgtacctgttctcacccgccaacgcgagccgcatctcgtctcgcaccgttttgttcacagccgttacccaggacctcctgaataaggaaaagcttcgcaccatgtttggccgcgacaaggtcaagaatgtctggatcgcaaccgataccaaggagctcgaggagaaggtcaaggaccgcgatgctgctgcgatgaagctcgagggtgcggagaccaagctcattgtgcttgctaataagacgcgcagcaaggctcttaagaagaaaggctcggccgagaaccccgagactgacattggcgatggccagtttgatgatgagtctggctccgtcgctgctcgttgggtggaggctaagaaacgacccacacaccgtctcacgatgcttattggcaagaaggtcgacactatcaattgggcgcgttcggaaatcgagcgtctctctcccgaaatcgaggagttgcaggcccagcaccgtgctggagaaaccaagctggtctcctccgtttttgtcgagttctaccatcagtctgatgctcagtcttccttccagtctgtggctcacaacctccccctgcacatgagccctcgttacattggtttagaccctactcaggtcatctggtccaacctgcgcatcaagtggtgggaacgcctcggtcgctacgctgccaccatgagctttgtttgtgctatgatcatcttctgggctatccctactgcagttgttggtgccatctccaacattgactctttgaccaagatcgttcctttcctgaagttcattgacagcgttccgtcatggattaagggtgttattaccggtctcttgcccactgtcatgatggcagtccttctggcgctggtgcctatcatccttcgcctgatggctaagttcgggggtgcacctagtctaccagctgttgaactgaccgtccaaaactggttcttcgcatttcaagttgttcaggtcttcctagtggtgaccgttgcctcatcggccaccagtgtcgtcagtagtatcattgacaaaccctcgtcggccgcctcgctgctagcccagaagatccccaccgcgtccaacttttacatctcatatatcattctacaaggattgtctttcagcgccggtgctctacttcagattgtcggcctgattctgggcaagatcctcggcagattactggatagcacccctcgcaagatgtacacgcgttggtcaagcttggctggtctcggatggggcactgtctaccctgcattcacattgttgactgttgtcggtatgttacacgagtgatcgatttatttgtttatgacactaacgtttctcttagcgatcgtctactcttgcattgcaccgcttgtcatgggcttcggtaccattggtctatacctcttctatttcgcctaccggtacaacctgttgtacgtgtcgaactcaaccatcgacacccagggtagatgctacacccgtgctctgcagcagctcactgtcggctgctacctgtccatggtttgcctgattggtctgttcgccattggcaccggtgccaatacgatggctctcggtcccctgattctgatgatcatcttcttgatcttcgtcattctattccatctctctatgaacagcgccatggagcccctcctaaactaccttcccaagaacctcgaggcagaggaggagggtctgctcgccgctgagaaggccaacatcagtactctgaacgagaactccaagaccgatgacatgtccggtcccggtggctccatctcggcctcccgtgacagtggcgtcgccaacgtggacaacagcctcggcagcgtcgactccgccgagaagggtctcaccgagaagtcgccgccagcgcccaagccgaactttttgaccaagttcctgcgtccggacctgtaccataactaccaccagctgcgcaagttggttcccagctcctcggaaatccctacttaccctgctgaggtcgagcgtgacgcctactgccacccggccgtcagctcgcacccccctcttctctggattccccgcgaccctctcggagtcagcgcccaagaagtcgctcacacttctcgtgtcattcccatcacggacgaggatgcctatctcgatgagaactgcaagatccaatggaacgaggagaagggagagccccccatctacgaggagaaggttacctactaagcgccctctctacttgcgcgatctcgatctagttctctattagagtgtctagccgatgctctgtctcaccggccggcgaatgcaccgtgttcatatatcccttgtatacagacatgccatcgccgacctggtttcttctgtgatacccggccggctagtccacctgactggctggctataacccggccattttgttatatttgtcaatctaagattggtcttgagcttatgtaactcccggacctttcgcttttcttttctataatctcttaaaataatcaatttccacttcgcatgtcgataatctatgttttgagaaagttagccatggaattggaaatcttgaccatcctccactattctttttttttggattacttattgcatggtttttagccggccacttttggtcatggctgcaaatgatatggtcaattatctatctttttctctgattcctacgcagtcccttactctatttccaagtaaatattcttctttgtctgcatgtctacataccgaagtcatagcaaaccaaagtcttctattttgagcaatgcggtcattgcgcgatccgatagcagttcgtcgaactctcccagttcctatctcagttgttcggatgaaatgtgctatgcagtttcaccttgttgggctatagcgtatgtcttcgcggcgccttttggtcacacccatcggtccagatccaatgatataccgttggctggctaagtggccggtgtgagaaggggttctcaccctattctcacccagttctcactcagttctcaccttgctggctcgtcgttgctgctgcgatgcggttcggtacctccgctagatggggcgggccaccgtcgggcaccgataattggtagattcgcagcccctaaaacagttcaaggcagttgaagatgagctcgaagcacaacaatgcccgcagaaggctcgacttgatgccataaagcagtgcaccacactcgaaacaatgtcgtgctcgctgcctcgcggcgctcagtgcatgagagtataggggcacctgtcaccaccccgttctgcaacaatgctctctgggtacattgaagaactctgactggatggtttagaaacgccaaccttacaaacgagggagggacaatcgtctgcggccgaatcgacgtgggtatcgtatggaccgaatgcccaatctagctccttactagatacaactctgggagttcgttccgtgccttagtcggtgaaatctcctgtttgtaagaacaagcccatagaattgaggcggagaacgatagtacggaaatttccgattatacgttcatatagcggactcggcgtgcgcgactgtggttcgaacacctggcaaagttcaaggtctgtttcgatctggggtaaagagacgttgcggaatttcatgagcctagatattgcgatggtgggggtatgcgcgtcgatatcatgtagggagcgcgggcgaagtgttcttgcgttgggaggcacgataagatcgttcgactctcttagaaacggctggtaagatgcttgggataggagtatagttgcagtggtccttaagcctcctatcgtgtctgctgtattttgtggtctatgcgttgtgaagttgatgtatggacgcaggtagacgttgtcggtagctacaatgtagttaattgataactctgggcatgtaactaagttagttatagtttaaggttatataagtatctgactgcacataaaccaggcaagatggaaaaaggaagaatataacattcctatctaactaggtagtagtataagatattttaaataccctttcaggtatcctttcaaagatcttttcaaattgtcccttaagatgcctataaatatctatttggaatgatcagtggcatactgatgcacaattcctacaaaaaggctttctcatacatgataccaatatgatagacacagccagcacatcttatgggacctagactacccgttttgatcgaagcaatcatgatcctggtttcatcgtcggttcaggaattctttagatgaatctctcgtgacctattggccattcaacctttcatccgataatgtggaagttaaggttcgctggtttgccttgaaaacttaccacgttgaggtatatcggggtcatcatatttccataaatgcagcctctttgataggcaatttgcaacgactgcaccatcgagtgacatcagtgttctcgtcttcgtcgccgagtgtatcgaaactttcttcacaataaggtgtagacagtccgtgataatagcccgtcgcttgactcgtggggaagaggcgtggattagaatttaaatgccccacaggtgtattacgtagacacgtacgtacatctatgatagtccatactagtgtagagcacaatttagtgaattgcactgttctaaagtcaagacatcgctatcctaacatatagataccatctcaaatgtttatttttctcccatgtagaaaaataagtctttcatcaagatcaacagatcctgattctaaacctgattccaacatgacaatggagaatagtacctcgaccatgaaggagcataagaaaaaagaggcgggataaccacccgctagagcaaaaaccaaggaaatcacaaactaaaaaagaaaacgtaccaagaagagaaaagacatgcaacacaaaacagaaggaggccatcaagacatcacgttaaaggaaccaaaaaaaagtcacacacatcgaggttggatccgaagggtatcaaggggaagggaaacacattttgcgacaggacgaatggcaagaaatcggacaaaaaaagaacaaacagacatcatgcatacggacgaaagatcacagaaggatcaaatagttcgagggcgcaatgcctgtatctccattttgcttccgagcctgccaccatcggccgctcacatcagatacttccaagatctcgtgcttggcgaagctgatttcgttggcgtcttccgggttggcgtcatatgagtagatagccttggcgcggtaggggtagtctgttggctgaggcacttcgcccacttcttgctcgccgttaccgggagtctgagggttgggggtaccgaatcgaggcgcagaggaggttcgttcggcgccgggcgcaccgccagggtacccggagacaggggacgaggtctcgaagccgccaagttgggcggaggtgtacatctgcggggtattgctggttgccatggtatctgggcgggcgccgaatgcgctggacatggggcgactaccgcggtaggagggctcggcgggctgttccttgttcagggcgaaggagtcgatgaagccgcggtgagtggcctgcggtgtggagccgaagtagaagatccagacgatgatcatcatggaaagcaggatgaagcctgcgccagcggcttgcatggatggttggtttccgtagatcaggttgtttgcgctcgtagatgttaggacgaggccacaggcgaggtaaccgacgatctggagatattgtcagtactggaggctcgtgttatctgtattcaagagtcatcataccgccatgccataaacgtggcctgtgtccgtggcaaaggtcgtgacgaggcccacaataacacagaacatgtatgagatggcccaccatgagtagttaggatattcggttttcaaatcggcgatgatagatgcgatgagagcaataagccatgccagctagaactgtatgttagtcaatatcgggtcatagagaaagtcgaacgaacaattgaaatcgagacggtcatgagcgcgaacggatcgcctaggatgttgctaggccggaatttgcccattttggcggatttattggattgggcttgtgtaaagggaattgatatgagacgggcgaagaaaacgagggaatggcgatgagcgacgtgctttgtatataagagttgttgttgattgttgggtcctaaacgaggcggacgggaaggagtgactgtggttagttagtgtgggaacgacaggcgtgattgcatgggatgtggcaatgaattatgaatgcgacagtttataaaggaagcccgacatcatatggagtaggcagatataggattaaagtaccttgaaaccgaagtggattcagagacaatccgtggggatgaagaggttgggaaccgaaagaagggaccccttacagagaggcaaaaccagcaccaggctgggataaaatgaaagaaatgagagagggaatcaatgaagataaaagagtggataagattgaaggttgaaagagaggagagagaggagaatgatggaaaaggaggaaaagtggcagatacgctgtggagtccgggtcccccctggaaatcgacggtctcgattcttgaaattaaggaaattaagaaatttcaagggaacaagttgacttggcgggattataatcttataaggtacatgacaattaccttggtcgtttgaattactttatctcttttgattcatcgctaattataaaacaatgaaaatagacttgatctggtacaaatctataaatatccctaaatatcttagtcacctccgctttgtgcacggccatgctatgacttttatgactataattcgggacatctgaagtgtcagaaatatttcgtaagtccctatagaacattttcggtcttataggataacaactaacacattatacagcgacttcagttcgcaaggtggtcaagacgggtcagcctcatcttgtttttctgtgaagaattgcccggaccattttggtttctatactcatgaaatttcgaatactaactatactccgtacaagtacatacataccgagtccgcgttgatcgcatctgatcagcacgtgttagacatatggatgattatactatctaatctatacctacaccaaatctacagatgtctgcccgtagtacataacagataataagtatactgtaaggagtgtgttgttggtaccacactcgcgttcttttccgaatcgggacaaaccttaagaatgaataccaaatccgaaggatcataactatcaaataccaccctaaaagtcgcgagcttacgacaaattcttgctcagcctagatgaaccatggatcctagataaaatagagtccattgtatcaataaaaagtaggtttaaggtagaaaagaggcttagaagtttatccagggcccaggggacaaagcctaagactcttaagagttgctcgtgatccaaggctcattttgtcgttaagaagccacgtctgcataccttgaaaccatatctacacagtactgatggattatgttcctcgctcatgatcccacagatctattaagacagcagtatcgtcctcaggtcctagaattactgtttgctattatgccaattaaagaaggatgtagcctctggtagcggacaatatggtgagacaattgacaaattagagttctcttccgattagacacattagacgcaatttggaggccagcacaatgttattaatgccttgtaaagtctgaaaacaacatttgaagagcaaaaatagaataaaaaataagtgaggctgacccgtctcgaccagataaccttgcgaactggagtcgcacgcgctaccaattgcgccacagccccaagttggtgacatattttcgtgaagatttgccctatatttggcaccatgggagtcaaagatgtatctgactttttctcccccaaaagaaaaggaaaaaaggagaccgaccatagacattcacaacaatgataagtttgcagtatgcagtcaatagtgaataacaagagtagatgagtagatgagatatactccacaattattataaaaaaattggtactatagtgaaaaaaagaaaaaaaagaagatgaggctgacccgtctcgaccagataaccttgcgaactggagtcgcacgcgctaccaattgcgccacagccccaaattggtgacatatttgccgcgctgtggctttatgagcattggctctcttaactggatttaggcatgtatgattctgcgtatatacttcagcgctaatgacttgttcgtgttagccaaccaacgcacagcatcatatcattgatatacataggtaacccaatatcattgctaacaagtcaccagtcaatatacataccttttctgcatcaccaaccacagtttgcgggggaagaatccggggtagattatcacattccaattgaagtatggaatgaaggatatgatatacatgaacaagttttacatgtgatctaagctttacatatgccaactcggcttggccgagctggatatcatattccctcgtatccgcagatgtacttgaatatcaacgcacatacctatgtacgtgtgtgttgtagattgattaatccctctattttaaacttggaaatatcccatctgcgctattcaagctaaaagcacggtacgccaaaatcagaggtatcatagcaaaaagcagacaaccgaaacaaccagaggcatcacactcctccagctcctctccagaataacacccgaaacaagccatttcgacaagattcgcctctaaatttcctcctccctgccctgcctaacaacctctttcctcctaacctccctctcaacatcctcaagtctcccctcccattcagcccagcactccccactcccaacgagcccaacctcataccagcgctgcagcacgcgcgctgtgcgcacccgcagctccgagatctcagcagcctgctcactctgtgtctgcgcgagcctgtctaactgtggctgtaggtcgattagtgctgcggagctctgcgcgtccggcacggggaggtcatttagcgatgtaaggcgcgaggcggtttcggggaaggcggtggcgtaggagaggactattgaggctagggtttggtttgtgaggccttcggggatttggtgaggtggtgttgtttggaagagatctgggttgcggtcgtctaggtggtttgtgttagtatgaattggatggtttggagtggatatttcagaatccattatccaggtatcagaaatgcaattcaaatagcgagaagggtatgagatgaggggacggtgtagtggtgaagcgcgtgtaaataacattaacactggtcggtgacatacggagttgtagaacgtctcgtacggctgggacccttcgactaagccgttctaattctgattctagccgtacgagtcggcgggagactgtctcgtcgagagatgcgggcttttcgggcgtggtagggacgccggtccagtctgtggcgccggtgaggaggtaggcgaggcggcgtaggcgcgcctcgaggagttcgatggtggctccggccagtgcatcactttcgagggccatggcctatggaggtcaaagatcaatttggggaattgtgggaggaattaacagagaaagggtgcctgaagcttggtgaggtgcaaacatggcaaaatgtggggacaagcttatcagccgtagaaacctcctgaggtcgatgtagacttttttatgcaagactatgtctttttaatatgggtttcttcacacgagaccgatacttaggagttgaataggagttgagggtttattacaatctgatatttgacatatctcaagcttgacattgctctacagtatctacacattcatcactcactcattattcatgtgcttccttctccgcatgcttcattcaatctacttcgcatgcttaagatgatttgccatttcctcatcatcagcactgttccacgctaaatccacttgcgaggcagtgaacgccgtggagttatttgcagtggcaggatggcccaagagactcgctccatccttctcctgcatctcttggctgggctttggctcgtcgtcgaacgcggagacctcgtagtcaaaaacattcacctttgtggacttctctgacatttcaggctgctgttctttgggctgagtttccacgttgttcggctctgcccagggatcttcctggtcactaaagattatggtaggggtattctcgaattcgcccccataagcatcattgtccctgttcacgaagcccttttttcggttagccggggaccgcataacgatctgataacactagtgcatcttacctgaagctgtgacggcgcaggatccacttttgaattcactgcattctcgctcgcataaacaagtaagacagaactccactcttcacgagcggcttggaggacttcaatctcctgaactttccgaacagtgtagccaacaacctcgctatcctgtgtagctgcagtgttgccttgggcctttcgtttctcggcttgtcgtgtttttccatcttcccctgagaagctgatacgccaccactggtagtcattgttgttttcggtctccgagtccatatccatcaagtgtcccggagtagtcgttctaggacttgataaaacataagtcacatgcggttcagtgcatacacctcggagtgtatacttgtggaaaggaggctcggaaggtgatttgggaggttcgatgagtgtctttgatatctcacgaagagactccatggcactctgctttctaatttccagttctgtgctcatatgattagccaacagtatgagcacggcagaaacggctatcttcacctttgagtttagcttctatgttcgtagcgattgctctcaattcctctgcaactcgcattgtctctgcacctgccgctcctgaatcagactgatcagactcgcccacttgctcgggtgtaaccactggcaccgcctgggcagcttgttcgaggagttccgtgatcgtcgagttgcccacggggtcccgtggaattgtatagcgatgtatgagttgttcgagtttcaacacatctccctgtatctgttgtcgttttgcacggaattcacgggagagatctcggcagctgctaagataccgatctgggtagaacacagagtgaatatccacaccaacagcgtttggtttttgaagagcatcaagtctaatgactagcacgtctgctaagtgttcaagccatgtgtcatcaaattccttccccggtctgtcagaccataaagctgaatccaaaacgtcatagagcgtttgatcattgtcctgctcaacaggaggctcaaaagtgaagagttccctggtgatgggctcaacaaactcgtcgaaagtttctctcttgtatgcataggtcgtgaatatggttgtcagtggattttcaggatctgcctggatggctgcaccatgccacgcttccaaaaacctggtgacaatctcctccgaatcagccgataaggatgacatgctattgatttttgctaagctgtcgctgctgccaaaagcacgtttcgtggtatccataaaagccatcaagcgctgggtctcatgaatgatatcgtcccagtcgctatccccggtcttaccatcattcaccgtgacaatcttcggcaggttaattggttgcccgttccaccactgcggctcatggccgtagtcaaacagtggtttattccgtaagagcaatgcttctcgcgcgaggggaatactgtggagaatcgtcaagagtcctcctaggtaaaggccgtcggtgttggggcggatgaacgcaggctcgccctcgactcttttgcggtcttccggatctgggctaatcatgacttcttcggaggatgtgttgaatagggtcatcgcccaagcaccttcctcgtagtgatcccgagttgctttgttgaactgcggctgtctatgcgacgtcaccccggtttcctgctgccccatgtccgaatttaatgacatagcaactgcctgctgtaattctttttcttcgcgttctgccagactgagcccatgtccggaaccttctatatggtcaagtaaccgcaaattagtacacttcttgcagttgaagcgtgaagactgtgatacctttcggagcgatcgcgacagaatcttgatacccagcgttttgttccgagtcacgtatatctactctggaaggaggacgagtgggcggtgccgtcggtggcattggtggcgcattgtcttgttgagcaaaatcccatgctgaggcggggtatgttaattcccagtccgaagtcgcataagggaggttatcttacaagagcctccgttatcattccagtaactagttattggcttggcggtgtcagatcatagccaggagttgctgcgcgtcgccaagtttacctgtagctgagaccctgtcggatcttcgaagtacgcgttgatcgctttctgtgagtcgagattgtttgcctgtacgcgatagaattagctcgattttacttatcatcccgatggcagtcctctaccttcaagaaggcgatggcttgctcgcgtgtggtgcttgtgaagctgacgaagctggtgatagcttcctcggtcggttcggaggccatgttgttgttgtctagttctgcgctgaagctagacaccgatagaataatgaataagcatgagagggacacaaaaagcaaatagaacaaagcaaatggggacagaagagttggggaagagaaagacaaagtgtcgcaactgagcttccccaccacatgacgccaagcatcattccgctatttgcgtctctttgtacttctccttgtcctccctctgcctcgattcttcacttctttgagcctaaaatatacaggattggacattctcgaacatttcttgcattccatagcctgttccaggtttatcaaggcccatcggtcggactagttcacgttcacaatggatatatatatttttctggaactgattgtctccctttcaagtctttgaacggcctactctgggtcttacaccacaatactatttatggttgaaacaaaacaatgcattagtacaatagctcttgggctgtcggtccgagtggatataaaaacccctctattccgcgccagataatcattcattacactttaaacaacacatcatctttcactttcacaagctctcgaattttctcatactatatagttacaatggcctacgtaccccaaatcacaaataagaaagccaagaaggtcaagacagtcaatacccccaataccaccattaagaagaccaccaataggaagactgccaggaagagcgccaataggaagaccaccaaaaaggctcccaatcctcctgttgatcttaacaagcttttcccatcctggggctctgaagacgcactgaaccagacggcaaataaggaagctactgatatcattctagccgtgtaccatgacatcaatgcctactgcaacctcgagagacatgcgagaaacaaagtttacggttctcaagagacgttctacaacctgcttgtcttcacagaaggctttgtggagcgggaaatcggctactacacgtcctgcgtggaatcattcaaggcggaacacggtgagttccaacctgtcacacctaatagtagattcttagaattcgttactgggctcgggtggaagatgtttgctatcttttcccatgccgaagcattccgacggggtatcaaagaagccgacgataggacctgggggctcctgctcgagaagatccacgaaaactccatgagtattgaactttatgcgcacagtcgtaccctgaagtggcgtaatattcttcaggtctaccaggacaaccccatcccaggcctgccagatatgaaacccgaaatcgagacatacatgggatggaaagtcgaccaccctcatcacacggtcatcacgcttgatggcaagctaaaggaacccacatacaatggcaagttacagcaacacatcaacgagagtatctatgatcccaagaagtggagtggtcagaaacaggacccgacacttcgcaagaagcccaatggcagttcaaccaacgtcggacgcaactgtgttctatgcggtagccctgtttcttgtgactgccgcttgaaatctcgggcaggagaactggttgagcttagagaatacaccgagaagggtactggtgtccgagcgctggcgagattcgggcgcggtgatattctcgatatcttcatgggtgagctccttccccaccccgcagaggatgtttatcctctaacacaaagcgacgacaaattgaagttctccaatctgtgtacaatttgccctcaccagtttggcaactggactcgttatatcagccactcgtgccggccctcgacgcaattcatgactcgcaccattggaaaacgagttgtgtgcacggttgaagccattcgcgatattctgccattcgaagagattactgttagctatggcaataagtactgggagtctgtcggctataactgcctatgcggacactgcgatggttctgggactgactagaaatagattagccaactatatattctgcatcttagagttgagagctgattttaatagcaaagcattgaatagacccttgatttattttatttcaacgtattaatgtaggacacatgtagtgtccactctagtaccaaggtgatagggtgatgtagttcctcgggtatccccgcagttctgggggtgcggggaaagctatactttccgcggacttactccgccttttgcgtccttttctccctgctgttctaaatcccttcatttggagaagttgactactacctatcgcattgccctacacgactgatacagtcaatttcagccctcaagtagtcatgaaatcttggccaagctaacattggaataaaacatgagctacagcggaattatcacggggctgagccggagaggctgtacatcctgtcggaagtgtgtgcttggaggaaagagtgtccttcagcaagcatccttggtcaagagaggactgctgacggagagctatgcgcgggggccatcaggtgtaagtattctctatctaagaacaaggaaataacagtatttatctgaccgtattgctttcgatatagccgcccttgattgagtccacagttggggaccatttcgccaagattgtcgcggaatgcggagatagaacagcgtgagaaccgggacgcaaaattggagaattaagactggaaatattaactatactgtccagtgttatctcgagacaccaaaaagatcgagctacgtatgcctccttggacacaagaagcaatgccctcgcccgggggctggaatcactgggcgttgtgaagggggagcgggttggagtcatgcttgggaactcgattgaatacgctgtggtacgttgcgtgtccctaaaaatggttgagaagagaagaacaaggcttacatccgtgagcaggcaacatatgcgttattcaaacttggcgccgtcttggtaagtcagtccgctcattgtagtaagcgacattgtatctaatcatttgataggttccgctcaatccgtctttcaatactgcacaagtgattgcggccctaggtcacctaggatccggtcatcttctaatcagtacagagtccaacctgccccgaaaacaaccgcgcagtaatgttcccttgctcaacgacattgttgaagacctccacaagtcaaacctggagtccgcattggtcccttctctgaagaacatcattatggtcgataactctgaaggccgcgtggatatatcttcctataaaagcttgacgccgtatgcatctattgtgtcccagcttactgcagacggccgcccacttcctccccagaatctctcgccggatgaaactgtgaatatccagttcacgtcaggaaccacatcaatgcccaaggcagcatgccttacccatcgctcaattctaaataatggctctcagattggcgatcgcatgcttctcacgccgaatgatattgtctgttgcccaccaccgctgttccattgcttcggcggtatattaggctatatggcaacagcaacccacggctcagccatcgtcttccccagtgaatctttcaatgctcgggctgcactagaagctgttcaagaggagaaatgcaccgcgctgcacggtgtaccgacaatgttcctcgaggagttgagcatgatcgagatgggagaaatctccaaggagggattccagtatcttcgcacgggaatcgctgctggaagcagtattccttccgagatcatgaaaaaactacacaaggtattgaacctgaccgaattgacgatttgttatggaatgacggaaacaagccccgtctcggctatgacaacgacggatgatcccatcgataagcggatctactctgtcggaaaactcatgccacatgtcgaggcaaagattgtggaaccgatggacaagaaagagattctccccatagagacacggggtgagttggcagtaagcgggtacctgctgatgaaggaatactgggatgatccagaaaagaccgcgcaggtgatgataccagatgagtctggaaagttgtggatgcatgtgagtctaatcatctattatttgtctcaagtaatgcgaatttctctgaactgtgcttttagactggagatgaagcttccatgtcatcggatggatatatcactatcaccggacggatcaaagatctgattatccgcggtggcgagaatatacaccccctagagatcgagaattgcttgctagccaacgatagcgttgcagatgtgtctgtcgttggcgtccccgacgcgagatatggcgaggcagtggctgccttcgttattcctcgggaccacggcttaaaaacagtcactgctgaggatattcagcaatgggtacgtgagaagcttagcaaccatcttagtaagttataacccagaccttgggactgctgcatcctttccatcgtttgcagctggtcttcggtcatcctcaaaattgccatatagaccgagctgatgttttacttgcgtatagttccgaagtatgtcttctttttgggccctttggaacctttccctaagacagcaagtggaaaaatccaaaagttcaagctcagggagaaggccattgcacttttgactaagagcgctgcataaatagcgagcatacaaggccgaggcctgactttgcatagattctaatggatgagtgcctgatttctgtacatacttagttattcaagccttattagatagaattgtcgtatgatcaaggttaaattaagagcctgaatagatacattcatactgttgccagattaagattcaaagtagagtgttcgctctgaagtgaaccctggatcatcagaaatggacaacagacaagtaccaagtgcaagagccagtagttgaagcataaacctagaaatgttctcatggcaacatagagttttccgcgatggtgtcggtgtgagtacctgctttctttcaggatatcaagtcgtggtagccagtggccatcgcggacactttcagacctgccacatcttaatgacgaacacgaagctgtcgatggggtaggtagctcgaaagcagtatcaaatccctcttctgtggctttcaagggcgggtcgtttcagagatagcgcagtgatgtcagtcagaccagcacgagtaacatgtataacatatcatgtagccagtgagcaagcttgctgtagcacacatctccagggcacgtgcaacgaggtttctctaaatctagaaatcctgaatgcctgtttctccctggagatttgggcgagcgccgtcctcgcaagtgccgtcaaccacccattcaggctcctcatcctcgaaatactggtcttgctcatccgagtgatcatcatagtcgtcattttgatcaacggtctcgtaatcgaaatcagagtcattaccctgcatgaaacgcaatcccatctcccagcgccagagccgctcgccttcctccttatttgggggtatttcatcacggtcctcagcaaggatctccccatctgggccgcgagtataggtcatcatagcgttagggtctgggtttgatatcgcgtccatcttggcttcagatcgcaggagatcagtctccaggacgcctgaaaaccccttggctcgcccctcggcctctctttcttgtgctgtctggaaccggcggatgaggcgatcgtataataacgggtctgcggagaagtcgattaggattagcattgtgttttcttgttcgctcctgtatgcaaagccagctggcaccagtaataaaccaggccagataatttgtaaaatgattaactggcaatgggagagaagagatcaggcggaccggctagctcaagccccgccgagaagtattctgggtgcaagtccagataccgcttgcgacggtttttgactgtgacagctttttgtgcgctagacgcatctttggccgtaaacccagaatccttggggaaatgtggcatctttggtgtgtttcagagtgtggagatggataggagaggagaatggaagttgggaacgcggagctcagcggcaaaagtgccttcacctccgcaataacttttttctcgttgaagaatattttgagatgtatctgctttgaacgtgtaagttggggatctcattcaaaataccttttcattattctatggatgtttttttggcaataagggggaaaggacacagtttcaggttgctaacaagcctgcagatgcgctttctaggttgatttcccgtatatccagaactgcatcagctggaaataatgtccccccaggacatgttgcggcacattgatgcccggcggttcactaccggtgtggttttgctgatcctgcttgccttctactcgcccctttcgaagcttgtcttgtctccaacatatggatccttccccgcgcatatcttccataattttggagtggccatctccggcggaatcgggtggctactgaaggacaagattctcaagcgcatgggccgtctaggtggctttatgctccctgtgttggcattctgggttccgactctccagtactttatcaagcagcaaagctctaagattggcaaccccacaggcccagtggtcacagaactttgtggttactaccctctggtgctgttgaccgtcgcctatgccggaaagcaaatccagactgctttgagactcgaagcgcagggcgacgtgatagttgagcatgtgcccctgataggtacatatatattctattcggctggcgaccacattgcccaatatgttctttcatggattgttgggacctcggttattttcaccagagttggcatgcaaatgcttctcgcggcctgttactctgtgctcatcccatcaaaatggctagtcctggccattccctctatcattttctcagtgacttcgaacgtacatttcgctggaattagtggtgtcaattccgcgattgagcacgaaggttattctcttttggcacgacaggaagcttacactgggtacatttctgttttggaaaaccacaatgaaggattccgagttatgcgctgtgaccacagtctgcttggtggacagtggaccaagctggcaccaggctaccgacctgaggtggatgaccctatctacgcagtctttgccatgctcgaggctgtccgtctggttgagccggataatggcgtttcccgcgttgacgcagacagcaaggcgttagtcatgtaagaattatgcaaaaaggatcgatcgcccagtttactgacagaaaatagcggtcttggagtcggcacaacaccctctgcgctcatcaaacacggcattgaaactaccatcgtcgaaatcgaccctgtggtgcacaagttcgccactcaatatttcaacctcccgccaaaccacatctccgtgattgaagatgccgtaaaattcgtcaagaaggcacagtcctccccgaatacaccccaatatgactacatcgtccatgatgtattcactggaggcgccgagcccgccgatctcttcacatacgagttcctgtcaggccttcactcgctcctcaaggaagacggtgccattgccattgtgagtttcatcaaggcaacaagccccccaaatcaactccagactaatgaatggaacacagaactacgccggtgatgtggccctctacccaaccggtctcgtcgtccgcaccatcaatgccgttttcccatcttgccgcatcttccgcgaagaacccactggagatgacgaagataccgacttcaccaacctggtccttttctgcaagaagagctctaacacaccgattcaattccgtgaccctgtcccggctgacttcctgcgcagcaagtctcgtgaaagctaccttgttcccaagcacgaactcgaccctgccatctttgcctcttggcccaagggcggtagaccaattttgattgctaagcaggccggaagattgcacaagtaccaggatcgcagtgcgatcaagcactggtctatcatgcgcaaggttatgcctgatgccgtgtgggagaactggtgagtgttgaaagggagctgagtaaaattcgaagatcgaatattactcttgctctgacttttatattgtctgtctatattagaagatcataggtaccaaataatagcaaactagcctacaaaaacatcgccttttagatctactgaaaggtacatacttgctgtttcgtccttcgtattgctggaaagacacgtagaataacaaatcacagacttcatattggtatcattatctaacacctgccgacaagccagggagctccatccactgttagagtaagcaacagagcaactgtctccccttcacaaattcaaaggtcccccaagagctctttcatctccatatatcaaaccacccagcccatcaccaacagtgagagttccggcctctgtattatgtacgcacaaagaactaaaatacagtgagaaagaataaatcaagccgaaggactgccacggggactggagccaggtttcttgacgaggccggcgaagaagttcgccagggcttggttgtgcgctttctcgtcattgccagcggtgcctgcatatgggctctctttctttagggttcgactagcctcgcggtcctggggtaaaatttagctatgtcctgggttggggtgatgatgccgcgctggacgggtgcttacccgaagctttttcaacatatcatcggcgtccacttggattccgcccatgttgaactgtacagggccgatgtggtcgttgactttgccttcgtcggccatgggagacatctccagttgcggggttggctggtttgaattctccttctcatccttggctttgagatcctccagtttctccacttgggttgcgaagaattcttggaggtcggtggtctcgacttcgatcttggtcgtgttgccgtgggggttggatgtgcctcgtttagggtcattgatggtcagttcgaacatggtcactgcacttgtgccttcttctgctacgccgttctcgccctgctggttgtcgtctgtggattggtagattgactcgggagactcctgaatctcaattgaccacgccgtcgatactccctccatgtcaaatccttcccgaataattcggatcttaccccatgagtcccagttggctggcactagaatcttgtctcggtcgatcacattatgctttaatgattctcttttcaaaagagagtgtatacccagagaagaatgaatcaagccctgaagagagtttgcaaggaatggggtagtatagatgagcgacgcgccgtctgtctagaggtcagaaagagcacaaatggccaaacacaggataataacatccttacgcttcaagagaatcgttctgaggaattggagaacgaaatcgaactgctcttcgtgccatccgtgatctttctctaatttctcgattttatccgcctgagaacgtcgcgaagtaaagtcagcaaagatttaccagcaattgatctctggataagagtttacataccccttggcagacaacacacattgggattccgaggccctcatcccattcaccgggtcctagaggtattgtgaccggaccgcttgaggttgaaatgccgcctgcagccgcagagctgggatcaattccccttttgcgatcgcgccattccgtcatggtctcttccataacgaatttggtttcatcgtcaagcgaaacgagcacagaacgtagcagacgggtccattctcttagcctgcgaacccacgtccatgggtctgaccagtccatcagaatgacaaccagcgtttccgggacggacttgggggtcaaaagtggtttgaggagaggtgcgaatgacggagagggctcggacaagaggtacgccgagacgcgtgccagggtatctgcgcgagagaagcatcagcatatgcctgatcaaagagtgcattctccgtgtaccttctttatcagcatcgaggacatctcgatatgtgtatccaagcgcaaattgattggcaattggtggtgttttccctttacctttccgcttgtcgtttactaagctagggtctgcagaggtgtccgcggaaaaagtatctagaaattccctctggctgtccggcgtgccacctatgatcgagctattagcgacgggtccaagatgaaagacgagactagaaatgaagatgagcggcactggaaagctcggatgaactggtactaacctagcactagcaagttcttctcgggtaagcgcttgccgttggcaacagtatctaatagagaggaccaaatgttcttcttggagccatctttgctggttggccgactgctcgtcttcccgggattcggactggaaggcatcgtgtcaagtcccaccgtgcctcaaagggcattcacccttccaaatgtctgtctctaccgtagtacagcggaaatattgttcgcgtggaaatgtggaggcggagggcttgtaaggcgaagcagcgttgcgggtcaggggaatcccgagggagatggataaatgtaggcccaagtgaaacaaccctaatcgcgaagggatctccgattgcaagtcacaaaaaaagaggaaggtctttttctggcacgtcgttgagcagggggctagtttgcattgtaaaggtgcgtctccgtaaacaattgattattacggttcagcgcgggctccacatttctttctctccaacttctgccacaccttgaactattctcccgcgcacatttccctccatgaattctattcgccaggtccaggcgctcaataagcgcgagcttgagcacgcgatgtaagtagaactcatgtgaagctcccgcaaagctctttttcccactgacagtcttacgttccacctatagacccccagaggcatcatggcatgcagattatcgcgacacagcctatatctacatcggaggacttccatttgatctatccgaaggtgacataattgcgattttctcacagtatggggaaccggtgcatgtcaacctagtccgcgacaaggaaacaggcaagagcaagggatttgcctttctgaaatatgaggaccagcgcagcacagatcttgctgtggataacctcggtggcgcaactgtcatgggccgtttgcttcgagtggatcatgcgcgctacaagcggaaggacgacgaggaagagcaggacaatgtcgccaagctaatgggagatcccggcgtcagtgagaacaagagcaaggaggacgaccggaggaggggaaccgcaatagaagagaggcgacctatgctgaaagaggaaagggaactggaagaattgattcggaaccacgacgaggaagacccgatgaaggaattcctcattgaggagaagaaagaagagatcgccactgcaatccagctgtggaacagcaccaagaagtcgtctcgacgacgcgatgacagcagagaacgatcaagccggcatcaccgccgacaccgttctcgttctcctcgcgagcgaagacatagagatgatcgctctatggatagggagcggcgatctcgccgtaggtcatccgaaagaggagaaaaatctaaaagggaccgctcgccgaggaaatcgcgctcgcccgaaccccgaagacaccggagtgatcgggatagacatgatcgccgccattgaaagataaatgagaaatcgttataaaggtttccaacgttatctacggtgctacacatatttctcgccgaaattctctccttgcaaattgggacaccctgaccaaataagagcgtttcccagtccagaaagcgatgccatgattcaagcttgatgctggcaaagagctaggtgctgcagacaaggtgttcgttacttgctggacgatagactacacccttggtgtgacagaccggggattttccttttgtcaacccagataccttttccagccatcccgcagacaatacctctttccttcctcgccatctcgaagcacaaatttctcccagcgcccttcttttccagatccgactaccaacagagtctggtcatcgcaccagcctatgaggcctttttgaggccgaccaaatgatgacccgatcggtggcacatgcgccgagccctggttggcttgctcaccaatctcaaaatgtgcgttggcaaatgaataaacatccgagaacacacgaggaagcaggggaatcttgccaaggattccccatttgtagctaggaggtgtttcctctaatgctggtgatggtgattgactgcgacgagtaacggattgctggtgggggatatcaaagatgtggagagtcgatttgtcagatgtaactgccagcaaagtattggacggcgaaaaggcaattgagaatatcactgcgtggtcaacaccgcgtcgcaattctgctagcttcgtgcaatttcctgtagcgaatatacgaaccaaagtcccctggatagatgttaataacccacccatagatgatcgcagcctaagataacttacggactcacttgcagtcgccagcaagttcccatcgggacttagggccatagcccgcaatggtgtgctatgtgcaggtatgatgctgatgttgccggtctccagctctatcatttggacctggccgggagaccgaccagggaaggccagcaccttgttatcgagacaggctagccccaaagggttatcggaggtttcaaagactgagagtttctggggagggttggagaatgcaaagacatggacgctgttcaataaaacagcgacgatttttgttttggagagacggacaccgagcacggaggtgcggaattcaagtgtgatggcggctttctgtttggcatcgtcccatataaccaactggggatatctgtgagcttagatgctcacattatgctagggataattgcctaccttattctgtgggaacttggggttctttccaccaccgacaatggccaagtagttcgactgaccaagcatttccgctatcccgatgcctgcgttgaagtcttaagtgcaaataagcgagtcaaggtaagtgacttgatattttgtatattcacaacgtgtagatcaatcgcttacctctcaaaaccttgagctcgcaagggttggcgttatatactgttcgggtcgttcatcagcctgggttccatagttcataatatgagctagcttctccctaggttctcctaatagctagatcaagcgttcctcaccacaaaaacccgtgtccaagcccactgagaagcagctgttatcatgattaaatgttgctgagagtgaatatggcccggtggactcatcgatagattggcgggtattcattgctgtatgtcaacgaagcataggaaataatttcttgatcagatagatcgatctgggtagactctgtatagtaaagtcctcaatcggtaataaatagttgatcttaagaatttttccaggttcaaagcttcaaatgcttggatgtctgagatcatccccgagcttcttaatcgataagagcaatgcgggcaagatccacatcgacgcctcaggctgtggattatgtaatcatacggttgccagcagagacccactttgatcaacccctgagttgctgttcgatgtgttgctgatgggaatgaaggcgatgttgtaaatggaaatagggggaatactcggtagataattgtcaatttcctgaattcttttttttcttttttcatccactcatcaattgtgactgatcgaaagctttgtagaagtaaaaagtagctggagaagaagagctgtcccgtgattggccacctatttgggaaagggggaaacacgaactgtctttcctccccccccctactctctccagactctcaggagaggcaagtttcaaacccttcgtcttcgttgttaattccttgctttggacttctttctcccgctacacttctttaatcttccctttactcacaatgtcgtcagccctcaatgcggtatgtacattccccttttattgggagcttcccgccttctcttaaagcttcccaagctaattgcatgcccgtacttgttccgggtagatcaagattcgtcgcaagaagaatgtcaagaagggtattcaattctgtttgatggtgtgcggcgccagtggaacaggtatgcttacaacggattactcgaatttcagggactaaccggatcctcttttccgcgacaggtcgcacaacttttgtcaacactctctgcggcaagcaggtcctagagggcaaggatgccgatgatgctgccaatgctcaccttgaggaaggtgtacgcatcaagcccgtgacggtcggtcagttgaaattgtcccccgcgcacggcgcttatatcaagctatcaatactgataccggatggcagagctcgagttggacgaggaaggaacccgcatctccctgaccatcgtcgatacccccggattcggtgaccagattgacaacgaggctaggcatgcacacacagatacccgacagatgttcatggactgacttttggatagcttcggcgaaattgtcggttaccttgagcgccaatacgatgatattcttgcagaggagtcgcgaattaagcgtaaccctcgattcagggataaccgagtacacgttctgctctacttcatcacacccaccggccacggtctgcgtgaactcgatatcgaattgatgaagcgcctgtctccccgtgttaacgtcattcctgtcattggaaaggccgactcgctcacccccgccgaattggccgagtccaagaagctgatcatggaggacatcgaacactaccgcattcccgtctacaacttcccctacgacgtcgaggaggatgacgaggacactgtggaggagaacgccgagctccgtggactgatgcccttcgctatagtcggatcggaagactttgttgagattgacaaccggaaagtgcgcgcgcgccagtacccatggggtgtcgttgaggttgagaaccctcgccactcagacttcctggctgtccgtagcgctctgctccacagccacttggctgatttgaaggagatcacgcacgacttcctctatgagaactaccgtactgagaagctcagcaagagcgtcgatggtggctctgggtatgtttctccttatactagaaattttattataatccatcggctaacaaatgaacgaacagtggctatgattctgctatgaaccccgaggatcttgcctcccagtctcaccgtctcaaggaagagcagctccgccgcgaggaggagaagctccgtgagattgagatcaaggtacagcgtgagattgccgagaagcgacaggagttgttggctcgcgagagccagctccgagagatcgaggctcgcatgcagcgcgagcagcaaagccagaacaatgccagcgaagcagccaacggagaggcctagatataccctgtcgacgatgcggctcattcgacggggcgccggttcgcaatgtgatactctaccagcatggacttttatggcaccaacaagttggcttttgtttatgggataatattgactgtttattcatgttaatggcttttttcttcttttcttcttacctctgcggggatgggcaacctcaactagattacggcactccagtcacgaattgtgggcgcaatgcttctcatttccaatgggagtctgaactatgtcgagttgggaatggttcttaccagttcctggaaaccctatgctcgatatatctcctcgcattcaatctggtgactgcctcttctctagcacatgttttccgccgtgtctaggtcgtcccatcttttttttcatttcatcacatcccagccgccaccgtgccatgttgccgcgtcatttctatttcctcctcttctgcttcctctcctgttcttgtccaaagtcgcagcgcagcaatattccctcttctcttgtttttttttcgcgttcgtgacttcttgttcattatctatttttttctcctcgcctgtcttcctaccccgatagtaattgaggaagaaaaagtacctggctagctcgcttgctctcaatttcttgttcagctactgtagccggtcactgcgtactatctgtagcagcatgctttagtttgtgatattacagctaagccgtcaaagtatttacatagcttgaagatagtatgttaggcttgcttgacccttctgtggcgacaggagatgtccagtttagggcctcactagcaaggcggttaagctctgcatagttaatcatttgaagatctggtcataccatggacggattaatgtgagccaatcataaagctcccaacaactagcaaataggtatgggggcggtaagacggctatatagtattgaggcttgaaatttcgttgctttgtgtggattattttcattatgactaggataggaaagttgtaaaacgaccgtgaaacaagatcaaatatccatgattggaattaatcacattataataccaagcttaggtctactgcaattatcctcatctgaaatgcaatagtgccattcacatcaatgagattgttaagtataacagacaaagatgcctcaaacccaaaacgatacaagtagaacgaagatgtcttaaagaacatttggaaggaaacaaagagagccatcgggagatagaaagagctaaagaagaaaggtaaaaaattttagaaagaagaaaaaaaaggagccaatgcaatagcaagaactgaaaagaaaagaaacgcagcaaaaagcaagaaagcagacacgcaagaagtggtatttgcgctccattgtacattgcgtagaaaagacggggaaacccccatttgttgtaattggtgttgaggaaagggagagataggtgtttgcgaagtagatgtggatgatcggtcagttgcagagacaacacagtacatacagccacggctttgcgagtatgatgagatgacacatgtagtgaaggacgggtgtcattaagaactttcggaagataagtgcttaatgatctgtggaaagagatgcgggcgacaacgtcaaagcggcgatgtcaagcaggggctgattgtggtatgtacccgttgaacattaggcggcggctggctgcggcttgttcgtccagaaatctaaactggcaacagtgtcatagcctcggtcatcttcataggcgtagataatctaccagatttagtcagcgcttgatcagtgaaaaagaactcccagagaaaaaccccgggaagaaaaatatggaagtaacatacctcgcgggtggaactgtgtaacatgcgaatgttcttgccggtcataaggtgtgtcaattcacttgtttcaacgtgtcgaatttcgacaaagttaggttcgaacgccagaatgtaagggtaggacagtgcgaatgcgttcgggttgccctcccaggcgatcttccagtccggacgagctcgccacccattgcggttgacgaagaatgagaaatcactgtagttgagtaggaactcgccattcatacgctcaatatgaataggtttgacattctcctttcgtgccacgaagtcaagagacgtgtcggcctggtcaaggagagattgggtctctgttgtttctagactgaccacctcaaagccacgtgcacaaccaacacatagagtagaacgcaggaagtggatggaagaagactcggcagggatatagtattccttagtgaaagtgttagtgcgaagtgaagcatgaacatggaagagagaaatacgaaccttgaatggcttgagagtatcctgaccaccctggaacattttgctgacagcagacttcttctttccctttgccagattgtccatcggctcgtagaccttgattgtacttgatagcgccgatgttttgactgaacaaacaagatgacgacccagaccaatgcctgccttgaaaaagttcgcatggccctgaattttcttcggccgttttgccatgctgttctggccctcgacataatcgagagcatccatgggataagaggaaagcgttttgtttgccagaaccaatagcagctggtactcttctaaagtgtctatttgagtgacttgcgtagcctctagaacctttcttggtttggctgttttgtctttaggccagcgttctgagacaaatatgccattatcagtcccgtagactaacttccggcctccatctggtggcagttagtgagtgacacgagttgaattagaacttttttgacgtaccaatcggaacaagacaattgattcggttgaccgctgcgaaaaagccctcgctcaggatcgtcttgttgtagaaattgctgttccgctcccacagtttgtgttgttgctgttctaccgcttcgataaactttcgtcgcgtggcgacgtttgtggcatagagagtctgctcgtaaccacccttgccgagatgcctgaaagtgataggcagtccaccatctttggcaggagggggattgttgatgacagtcttgtttgacaggagactggatgaaggtcttttggcaatccctagtcgtgggatgacctcttccatctgagcgattactaacagttctaaaggaatgggcttcctataaactcgagattcctcgcgtttattcaccattttgacgcgaacgagcaggacggcatgatcaaagagatacgcggtaacatcggagctgtcggctgtggttttcttaaatgacatcttcatgagcatttgtcgattttcttctgtgagcttcaaatcaacatagtccgcagagttgaacttcagcgcagcgttcaattggaccaaattgaaatggttctccgcttttccactttcagtattgacgcgcgaaaggaagtccttgatcagcttgatggccttcggaatatcttctttgtcggggttgccatccgcactgtttttgtaaacaccttcaagcaaaagcgggtatcttgcaagacgagttgtaggcttcgtcaaataaccgttcagttccagcttccgggattccttgagacgttccgtgtcttcgacaaatttcgcaaaggctgggttcgatgatttctccttctcaaactcatactttccgtatagttggttggcaccatatttgatgaaagggtcgaaattagggacatgttgacagaagatgtcgccaatggtgtgaacgacctggctctccttctgtcgagcattcagggcttcacatagagcgctgttgaccttgaggacctctaagcagttgccaaacacggttcgaataaacttctcacgccggtgttctggaattggcgagtgagtggtagttccagcagcgcgcaatggtcgcatccagaaatcccgcaaatattctaaatccttgacgaaatcacgctcggtgtacatgagctcaaagataacctcctgccttttcttctcgtggtcatcaaccgagtccgagacctccttgggcaccgtactaatccacagcttttggttatcattgtcgtcatcatcatccgggggtagagcagtcttggattccgatgttcccagtaccggctgaggtttcagattcaacctggcttgctgctccagtcgtcgcggacaagcaatagaatagcagagagtgtcccggttgcaagtgggagaataacattcagtcaggagagtgaaaactccgttaacctcgatcgtcgacttgtcttctcccattgtttccttgaactgatagacctctccgggtgcgtcgcgaagacggtggtcatatgtgacatcgtggaagaatttctgagcatccagcgcacggccgagcaagagagcgaggttgcgatcattggttctgataatagaagctatcaagtccaccgaatcagtacccgaaaacgcattttgatacgaaaggccgttcttctgtcgttcgccgagtgaaatcttctccctgaaaatctcagcaacaagagaaagcagagcaggatataccaccggaacctttcgctgcgaatccctagaaactagggtaaccttgccgccggagccctgtgtggcttggctttgaacgctcattgtccgatcgggcgcaacagtggatgccatagacatagtccgagatctctgcgatccatcgcttggctgacgagatgcaacaaattcatcgggactgggctgcatcgagtcatgccttattggaatctgctgatcgtgacttgacggaggtctgcggtgtggaattgaccttccgctgttcatgatatgcggatcccgatcagatgaccaggaagtcatagacatagctcgttcgttcccatgcttttctgggacaggacggccgagctgcgtgacctgagctccagcatgatactgttcacgacgagaagcagtggcagacgtgtgattgaagttgcttggcggaatctggtaaggcggcccgcttagttttgccattgaccttgaccgggatgaatcggaattcagcgcgggaggaggcatagcacgattgaaatccctagagtctaggtattgcggagcagggctcggtcttgactcgaggcgttgaggtcgaggataggcagcaaagcgttgttgggtgctagggttgtgtcgaggaggctgatgtgaagacattgttgccgaggcccctggactgtaggcctgatacagcccggacggctggggtggaggatatccatttggtggtgccgacggcggtccgtgtccatttggcatttgccgtgttggcggcggcggcggtctctgaaattggggttgtgcgacatgcgatgacatggtgtgagcgcgaccctgggcgaattgcggagtctgtgaattcattgtatgggaccgtcctgcaggcggtgcgcctccaaatatgtcagaatacgctgcatcccgctgcgtagacgaggcgggtccgtgaggccggtaattccggctacgctggccccccaaatccgccattttcgcgaaatatcagcgatcaaggatgagtggcggttgtttaatcagatacgcaaggtatatctatgccggggtgcgaagaaggcgaaaggggtatccgggttgatcgtggagagcgttcagggcgtcgcaataggtctgttcaagatcgtagaccacgggagaaacgatagaggtggaacgggagagaaaatttccgtaggcaataacctcgaaagaaataatagattgtctcaaagcactgatgggactcaatattccataactcccctcagttcggatggggaattcaaaggcgatatcaaagcggtactaatggaaaagcgccaggagccgtgagcgcaactaagtcagggctcctttcgatttcatgccctcagcatcctccgagatttgaggtcaggagtgagagtagaggagttgttgaaggtgggggtgataattggatgttgaaaatgcagtaataaactgggggagggggggggagggacccaggagaacgaggatggcgaaggtgacggcgaggccggtatggtaatttcagtacacagactcctaatctgccgttcatagggcttttaggagtgacatctgaaatacagtgggtatggtatcgtcaccgcccatgaccagacaatggcgtggactacggcgggcgaagtggccatgtggaacacccaaaaccccgacacctccagccgtcaacagcccgaacttctccctgcgcttgatcttgtatcaaacaggacccattttcttcttatatttcccccgtgtaatttgcaagattagtcttgccccaccatcactatggcagacagcgagcttgcgcccaagtttgctccgttcttctccttcgtgagttcaaggttccgcgaccactggggttcatagactaacaggcttcctatactaggcaggcattgccgctgcagtgggttcattccaacctggttccgactagacaatacactaacagttccctatagatgatcttcggttgtacgtgaaatacctctcatggatggagctagctctccaaggatataacgatgaaggcattggcagtcgctggggcggttaagaacctccttaaggacgtcagggaagtccttacacttataatggatagcatatcatcgctagagaaatcgtggtaccgtgagaggccacagtgggctatgaaccggttacaatggttcttatcggtgcagtggttcccatggggcctgttgcaacacttgagggccctcttacggtactgcgatatctctggcgatgacaatgacatcatttataagcgtaaggacttccttgacgtccttaagggggttcttaaacgcgccggcgactgccgatgccttcagttatatctatgttctaggtatttggacaaacagcttacaatctcacagcggcaggagcagcttatggcacagcgaagtctggcattggaattgcaggtgtgggaacctacagggccgatctcatcatgaaggtaagaaccgtttctctaggttccgtgatggacaggacggtagctaactgagttcatgactgcagtccctcattcccgttgttatgtccggtatcattgcagtttacggtctcgttatcgccgtccttatcgctggagcaatgggaccaggaagcaatgagagcttgtacacgtacgtttcgaaagttgggtggatgtggagcttggcacaagctaatgatgcacagaggcttcatgcatcttgccgctggaatgtcagttggtcttacgggtgtggcggctggttatacaattggagttgtgggcgatgcagtaaggaccctatatgcgcggcaacgtgagaggactattaagtcctaacaactactctagggtgttcgggcatacatgcagcagtctcgggtctacgtgggaatgattctcatactgattttcggcgaagttcttgggctttatgggtatgtttctgagtcggggttctttcagattacctttactaacatggtcagcttgattgttggtttgattctaaactcgaagtcttgagcgctgggcaattccatacgccgactcattcaacaacactttttcgtctgctaccggtcatcctgggctcgaacagacaccatttttgatatatgtgtaccaacaacgtaaccaggacagataatggccatggaaactggatcgagatatggaccgactggtttctgaatcgaatacattcttatttccggtgtacaataaaaggatcttacataggttcgggtcaaatcaaagctaagagcttactcagtccggtttatcaccgtagtttctttcccgtccagccccgcctcccatagcaaatacgtcagagaactttcattcttacaactctttgccccgcgatttttccgaaaccctagattctttcaaaccttcgaacctcgatgttctttatgatctgaaatccggaatcgagctgtgttgccgattggtggcgcgctaacggggtctccatacacgtttttttcccttttaccacgacatgatctttgaccattctaatggcaaccggagcagtgcaacattcgcctaatgaggcgccaggaaccatggtatttcccaaggtaaatggaaacctgcatcacagggacaagcaactcgtcgagtctttccgtcctcctccgcgatcctcgaacccatttctcatcaccgagcgccaggacgagaagcaactgtgcatctcgtcaaggagtctgcgcgtgagcgattttgtgctcgtcaagactcttggaactggttagcgcgtggccgaacccatatttctcttacaggagtcgcatctgacggttcatgcttttctcattgtataggcactttcgctcgggtgtggctcgcaaggttaaaagaccaaaaggacaagagcaaagtatatgcgttgaaaattcttcgaaaggcggacggtaagcgccactttgtctaacgttgtgcgtggcgagggacaacttgtgctgattgcgactggaaagtgatcaaactcaagcaagtggaacatgtgcgcaacgagcggaaggccctcgcagcggtcattgaccaccctttcatcaccaccttgattgcatcattctcggatgagaaatgcctctatatgctggtatggcaacttgtttttttggaatacgaaatatgtcttgattgatcacaggatgctgacgaattgtcagctggactattgtcctggaggtgaaatattcacatatctacgacgacaacgacgctttagcgaagaagtctcgactatctatgccgccgaaataacaatgacaatcgagttcttgcacgatgtacatggaattgcctaccgagatctcaaaccggagaatatcctgttggatgccgatggtcacctcaagcttgttgacttcgggtttgcgaagcaagtcgataatcgcgagacatacacattatgtggcacaccggaatacctagctccggaggtcattcaaaacagcggccatggacttgcagtggactggtgggctcttgggatcttgatctacgaattcttggtcggacagcctcctttctgggaccagaaccctatgcgcatctacgagcagatcatcgaaggtcgtctacgcttcccaccgaatatgccacctgcagctcagaacatcatctccctactctgtaaaacaaacccgtcggagcgactgggccacatctctggtggctcgactcgagtcaagtcccatccgttctttcaaggcatcatctgggatgatttgttttatcgccgggtgaaaggacctatacttccccgcctatcccaccccgcggacacgggtaactttgaagaatatccggatccccccgacctcagaaacacgaacatttacacggaggatctgaagaagaagtatgaggtattattcagtgacttctgaaagacttgtttccaattacggcctatcaagctcgcaccccaaccttcatttttccggcattctcaaatgacggccatttctctataacccccacgggacccccacggcacgcgccccgaatgcttctccgctcagaggccgcactcacgaatgatcgcgatcattctcgccaatctcacctttcgctttcagatacgatcccatgacagttcttggtatgtatgtctgtggcgaatctctcggagagtatcacacccctcgccatgctattcaaccggtctcaccgccaccatttgaccttcccttcccacatatccacacccgtggacaacgatatgaagaccatcccgggtagtatctttttttttcttttttacttcttctttttttcatatacacttccctttcgcaaaaaccttgttttgatcgatcatggagattgattaactggaatctatcaaaactacagcaacctcgcaaggtctttaagcgcaatcatgtgaatgggagtgtgttaatgctatttttttactctcttttcttcgtaaagtgatcaacatgcatagtcatgggttgtagatcacgatggtacattggtggttgctttttatacttagggttttcagtatcgtccataagataatgcttggtgcatccgcatgtagttatttcatcctgaatatatagtctcgttccgcaaattccatgtcatattacaatcattcaatagatcatgcctcttgcaatttggccagtagatacaaacatataggaagggagagaaccctatatactagtttggggtgcctaggattgacgtacctagttatatgatcatcagcaattgtcgcagtgggagctataacgcaccttcttatcgtctttggaatattaatgtttatctccttgttcagataaatctgagtgtagtagaaatacatagatcctcctggtggcaccctgacgtggtgggccttcgagcatacagaaaaccacaatttatcaagcccacagatgatggacttcaacctttgatatattgtatagtatgtactaaactcaccccaacagattcttcctaggttgctttgcacaagcggccatccttactctcggtccactcgtcagacccgacagcggttctagcgtagaagatattgttcggatcatatttagccttgaccttgcgcaaggtatcatagttggtaccatagaagaccttcttgaagttaggctgttggaagtcaccctgccaaaatgataagcatgcgtacacaataatgaagggaatcatagctaaatatcagtttacatacctcattcatataagcaccggacttgggagaaagcgcagtcagcttcggaatgaaatcctcggtcatttggcgctggcgctccaacatgagagcagagttgtcccactcccatggggtcgtcaaagtagtatcaatcaaggcttcgcgccaagcagggaggaccgcgttgtggacgtctccagataccttgtgggagacgttcaagccgacgccgataaaagtgccgcccgcctcggtgatctcacggtaggcagtcaacagggcgtgattgttgttctgaacgaccgatctcggaaccagccagccgccatattgggccgtgccaacctcaatggtgccttgcatgtccttgaactggctgtagtagctgtcgtattgcttggaaaccatggtgtactcgatgccgagcttgtcgaggctgttggtgaaaggcttgagcagcgtcaccaagtcagcgacagggatgttgggaccggtgatcggagcaatagagaagctggtgttggtgaagtaccagacgctcatagcacctgcgtcgacgatagcgggcagggcggcgtggaaggtctcgatggtattgaagaaagtgtcttgcgagatcccatcattcgtgtaggtcaggttcaggccagagacgggggttcccgggtgtgccttggaggtcatggaccagacgataccgtaagtgccagcaccaccgccgctgagagcccagaagatgtcagagtgctcattgtcgcgggtagccgtgatgcagttgccttggccgtcaatgacctcccatttcaggacttgatcggcggccaggccatagcgggagcccagtgcggagtgaccgcctccttgggtgtagccaccggcaagaccaacggtgggacattcgccgccgacgacctggtaaccagtttcctcggcgatctcgtaggcttcgtggccttggattccagcgcccatggtaatggcctttccggtgtagtgcttgtcatggtaggagtcgattgacagatccttcaggtggtgagtccagattgcaagcgctccagcgccagtggatcggccattgtagtcgtggccggtgttacggatgacaagacggatgttgtgcttcgttgcgaatttcacagcgttggaaatgtgagccgggctggtgacattcacgctgtagcgcacatagttacccagggtgcagggctttgagacggggtggaacggatcgcaagcaccctcggcaaagaacggcgccataaccgaggaagatgattcatagctgtcagaaacatatgtcagtactggccctttcgtgttattctatatgcagagtcacatactgctcctcaggaagtagccacccatccttcaagactgcacaggtctcggaattgtagttcggcgcatggcaaggtgtgccgagagggacggtcttgactagtcgaccatcgacggttttgttcaattgggaccattgatcctcggtgggccagcaagcatcaccgggaaagcaacggcatgccgaggctgaagcctgaggcagaactgccaacagcgaagcaatgagggatgcgcggaaaaacataacggattgacttcatgcaagtgtaccaggttgcgttcaaacgttccggtcttatgcgcggaaaagctaacaaccagagacggttcgcttagaacatagaaaatgccgcggtatcgcaatatatcttgaagctaataatccaccacgccatccctgccagccttgggaagcaatatcggaatgcagatcggaggggccaaaaccagccacccatggaaaagcctgccgtttcccccaccacccagtcttggaatcttggaagccaggagcactagtactccgtactacatataagctggcttggtacgtatgcaaactttaacataagccaccccaagcgggttcttagggttggaacatatggtccgagtaattgcatacaattcaggggcagatctcacctttattttagctagacctggctttctgctccctccttgaacaccactcgatgtgttctagattatagatattttttctagatggcacaggtctagaatgtataatgcaaaatcgtgttataatggcttgctcatagctaactaagccaagaccgaaaaaaaaacagaaaattcttcttattggcaaattctaattcatatcctctcgtttccacgctcgtgaagctagcgctgcatcttaattgcgccgatataagccccccgccgccccgccgccccacccgaatcaagaaatcttgtacgttgtactgcgaaatacccgtggactccgtcacaattatgaataatatgatatctcctttgcagaggctatcagctctccttgccgtgacaatgatcaagtcatgggctgggtatacaacctccacgagaccgatccaaacagcgagattccgcgcgtgatcgggatctgcttggcgtgttcaattacagctttcctagccgtatgtctgcggttttatgtgcgaatacgcatcagtcgctttccatggattgacgactatgcggcactggcgggctcactgttgacgttggcatacgcaggtatcgccgtggctcgtgagtcgattctcattgatcagcgaaggttaactgccgaactgacgaaatggttatttcagagacgcgatggggccaaggactcagcgcggcgtattttccaaaagagaatgttattccatttagcagggtacgcatcgcaaggtcaacattgttcgaactcgagcccgacgctaactttgtttggtctatagatccaatacgctggcggcccgacctattgtctcgctgtcctcggcttcaaagtcgccttgttggcctcctatctgcgcatcgcggggattatcgagcgatatcgtaaaatcataattgccactattgtcgtgtgtgtcgttaaccaattgattttcgcctttatcatatcaatctcctgcataccggttagcagctccccaacattacgcgccactcacaggaaacgggttatctgacaacaaacaggtcgcaaaacaatgggatacttctctcaaggggcattgcatccaaacaataccgttctactttgccctcgggggcacaagtattgtgctggacctgataatcatagcactacctctgccagtcctttggaaactccagctccacctcaagcaaaaagtcctcctagcctgcctgtttgctctcggcttctttgtgaccgtgatccagatcatccgcatcctcaccgtctgggacttgaagacctacaccgacagcaagaatatcgtgatctggtcttgtgtcgagaacagtctgggcgtgagttgatttgtgatatttctgcaagtccaaggaaagactaacaaaacgaaaacgtgtaggttatcatcgcctgcattcccacgtacggacctctgttcaagtcattcgcttccactgttaattcataccgaaatcgcgaaacttcaaggacttatgcgcttggctctgttcgccaggacacggggacggggacggggacggggcctgggcatggaaatagcaatttcgaacctatatatgagtccgagggccagcagatcactgagattcgatccggcgcgcaaacgaatgatggggatagcgaggagcatatattatcagaggcggagaacttaaaagtatatgtaacttcggagtttactgttaagtctggcgcagtttgattttggttggtaatagggaacttggaaagcatgcttttgaatgggaaatagaagtacatatgcccgataccaaatacgtgttatctagtactcggattagacatgcactgttgcaaattagtcgtgtgtaacaagccccattcataggcaatgggaaattctcgaaaagttgccttttggctatcacaacaatgagattggaatctataagcagctagtatagctagtagtagcaaaccatttaccgagaaaaaaaaaaaaagcaaaataacagtgtacataacaatgaaaaacaaagttggggaatcatatgaacagatatcatgaaacatggaacgggtttagagcttgcgcctgggttcggtcatatccaaggcaccgatgatgacagttcgatgccgatttgagagttttgtgactggagtagaaacaaccggaaaatctagaagggaggcgtggatgattaaatcggagcaaatattgagatgaactgcgagcaagggcctgcgataggtctccgatactatacagtgtacaatgttggaatggaatagaataagctttgggcatttttcatagcgatgggtctgtcttccatgtgcctaaaaaatgttagtactatgtccatgtgaaactacacgaacgtgtcaaaaataaagacgtacctccgaaattgtgcttcacaaaagccatgggatcatctgtatcccccgcacccatttgccccactccagggctgaagctggtaatggggagaacaaccacatccccaaccttgcggtgcgtggtttgatggctgaagtcttcgtaggtgatgttcttatcaccaggctggatattgaagtatgccgggttgttgaagtagcggaaaatagaatccgtccaggctccaggccctgtgaactccataatggtcttatccatcttaccaacctttaggatgcctgcctttttcattcgcagagcatgctcggtaatataagccaccatatcacgaagaatcggatgcccgggtttagacacaaaggtccactggcagaactgaagacggcgcgaataccagtcgtgccagtcatcacggtcaggatcagcttcgatgccaacaatgaagccgatagttgatcgatcgagttcctcggggagccacgtgtgcgcgggcttgagcgccgaagtgtcaatatcgctgtatattcccccgcgcgctagaaggaccaagtatcggaagaaatccgccttcataacaccgagcggcagcgaatcatatgcctcaaatacctccgggactgatccatatagatatttgatcagatgttgttgtgtgtcatcaggaatgacttcatgcgtgaacccggggtgcatctctgtccagctggcctcggggccgcgaaggtcttcgtcaaaccagaacgatcccgggctgtatttccatgtttgccagatgtatgcggggaatctgttttcgatttcataggggaattgataccggagacgttcgcgaaggggtgttgtccgtgatgcgccgaggggtaattgggcgcgaccttgcggtggtatttttcgtgctaagtttgctatcgcctcatcctcttcctgcgatatcttcttcaccggtctatacccaggtgccccgggaacttcaggatctcggaacgagcggaggatgagaacaaatgtgaccacgcagaacagggcaagcagcaccttgcgcggggtaatcatgacaggcgatggagccggcgcagtcgggaaataattccctggtcttgcgacagccgtaaataggctgaaagataggaatcaagtcaaggcctctgtgcttttatcttctgtgatccgcgggattggtgaatttgattcttgttatgcgtttccttcggcgggtgtgacagtcgagcgattccaaatcctaggctaaagaaattgagagggtgacatgtcgatatgcggaagtcttggatgtgacctcgatggtcggagatacggtcaacccaaaatcgggataggaggcgtgaaaaaccaataataattgagggtgactagtaccgcagaacagcaaggataaattgaatcgaagagcaggccacgctgtctagcagcgggtaatttctcgccttgttggctaattttattagacgtccacgagtagaataaggattgcgtatgccggaagcagcttctagcctgggtggagccactcacgtggtcttagaaatgtaacttcaaaccgccgtctttgatattgtttgttcttcatttattctttgttctgtcttttgcaaaaaaaaattttgcatatctctatgctattaacaagcaatgatcctactgcataatcacttggttttgttagagcgcccccacataaggtgctcgattcagaatagtcttgatctttagtttcttaactaaactgcgtaaaactacaatgctaaaattgtctagcctcgtatccaatatatataagtagtttagcatagattcactataaactccgatagtgatataagcttcgcttggtttagaaatctaatatggaaccctgtacaatatatcgcagagcaaagagcatccttttaccgaaaacatcagatctgccaaactttagggatttttgggctctttacttttaggtgattaacaagtattcaataaccatgtaggaagggccatgtactactattacgagaatacttgttcttttgataggactacgtaggcataggcttttgtcatattttgtctccacttttcgcattgcggactaggagacgtaagaggaaaacgggtcaaaggcaccaaaatagtaccctagagaaatgcaactataaagaatattgttagagatgccggtgagaggcttgccggccgataccttctcgttatgctctagatctttatccctattagcaatggagtatctctactccgtagtgaacaataatcttggctccgttaaaaatcctattttatatcatacaatataggatcatcggaaaatttaattagccaagggggagattctctctttgtccgtgatgatcttcgtggtagaaatagcctctaatactattaagaggatttactccgcttgatccctagaagcttaggtctcgcgtcaaagcatttattctcaaccttaaggaatggatttttgttgcaagataatatggtttttatgataaataagactaatacgcgaacgcgaacgtgaacgcaaagtgaaagcaaaatgaaagtaagacaagatcaatccaaaaggaacatcatccccgacgcatgatggcacatagattgaggaccacttctttcctattggactcattgctaaggtcgtaccagggagtggccaccacaggaatgaatgagtctagcgaatccaaaccaaaatccttaacatactcatcgctaatctcaaattggagaaagcgaaggtagtgctgcgtagcatgaatgactatgacggtctcacgctgcacgtcaacaaaccgagccaacagagcctcgcatgtcatctgggctagacacgcgtctgagatgatcggtttaccctcctcaaaacattggaattttctcttggcttccagaattgccacatgatcgttttggagtataaattccttggcattattctcatcgcgtgagcaaagacctccgtcatcaatggcagtaatcgagctaattcctcttaggactgtccgggttcgtaacttgatgtcccgaaactcaacaacactcgacatattgggctggtcttggggtgccccgaaatatagaatatgtcgaatgacgcatgatgcaaggcgcacggtctcatcttcgaccgtacctcggagttggtgttcctctttttcaatgtatccagccgatgacgcatcgctagagctcggagcccggggactgctagaagcaacttgaattgtcccagaggggacgcattcagaaggggacggttggttcagatgattcttcacgcgcccctctccccttagccctagtgatgcggccaccgtcgaattcagtagccattggaacatcagaatccgcgccatcagattcggtatcggaatgttcggaattgccgggggcaattgcatatcctgtcctcttagcgtcacgatcacccttgaatgctcccaatgctgaccacgtttgagcgagcgaaatgctatacccaaagtctcgcacaagactgtgctcgcttttctggaaatgcgtattgctatcagggcctccgaggaacttcgtgatatccaccgaagacgtagtatcggaatatttaaagtgttgggacaaaattggaagaatattgggcctttgtggtcgtattataacacgacaggcaagtagatggtcccgtccccatccactcgcggcagacattttgagttcggaagggtacttctgatttcttcccttgaactgaatgacagaggtgaaagtgtcgaaataatggggagacatgttgaagaacaaaattgaaaaggagagaggatctgtgatgataagaatgaacttgggcaggcagtgcctttttataccacctcttctgcaaatgtttgcctttccaccacatgaccatgaaacagagtgttggtgatgaatgcctgtataaccgccaggcccctcattttgaaactgctggcttggagtacaactgcagaggtccaatcggtttgttgggttagtattaataggcacgtggctggccaaccatatacatgtattatccctaccatatgtattattctaggccaaaggctcgtgaaaatcctttattagaaacatgagctagcttagttggcccctgacagctcccgtggtctgagagtggatcgtgctttccctaagcgccgagccccgtcatgccggacagtgacattcgatcacacttatcctcgccaatggccaggaacatccagctagtcatacatttagcgctgttaggtcataatacgcttctaggacccaatttcagcccaatttaatgtaaggggatcattgctaattctgaaatatggatgtgaagcaaaaatccaccaatagttcaactgatttgcactttggatgatcgactggaaacatcaaattagctgtacctccccttagatctggattttgctagttcagggacttgactaggctggaggtcagtataggacgggtgaactttcttccggatcaacactcaaaggcggtcaagacccgttttagactcccttgtattcccagttccttaacctcatctttacaagtatcttcagtatgacagctggcgcaatttcgcttgctgagctcatgagccatcatcgtgatctcttggttcaaccaatatgctggacttctcgtcatttggatatgctgggatgtcaatttgaacactttgaccatgtgccaccagacgacatcgaacctgatttagatccatgccaaccaattgatcacgaacagaagttggaagaacggagtcgcggaactcccgaggaactctttgaaggctcctctatactaagccggccgttcggcctctcatttctcatatggcccttgcttaaccgaagatggtgagcaataaaagccgttcgtgtcattgattcattccgccataactaaacattgttcacagtgaaacaccgtattttttttttgcaaataagagaattcatcggcctctgtatgaagtgttctatcgctgccgtaaactcagccagccagctagccaagcaccgcggccaatcgttggatatttggattattgccgcgtagaacgttaccgcggggaaatgtttatccctcgtacgcccaaacatggcggtgacaaccgccccgggtggagaattcagatgaaacgagtagcccagatcacaccaaagaactggagcgaggatccgtatctgctgtgtgttctgttgtcccttgcacagctccaggagtaccatcgaaaagagtggcacccgcccatccacatagtaagtactctgctactcctgccgtttttcttccttggatgcctggctcatttatacaagtcgcgtctgattttgacaaccaagccgggcgataaattcttccatatttttgaagctcacataacttctgagcttctcggaatgcttgacaacccaaatactgccagaaagcacatagactggccgaccatcaaacacaaaaaggtcctattcagacctcttgatagtctcgcagagcgacttcaagctgagatcacccttaaccagccacctggcacattcgatatctcagatccagctaatccaaatgacatcaaaaaagaagaagaggatgtaatccacatccaaagaacaaaagaggtcgaaaggaagaccagaaagagagcaaaaaaagaatcattcgtccgttccgagacaagagtttcatgaaaatgcttaaacaaggattacgacaattacgccctggttggtctgcgaggtcggctattagaccacactacaccacaaacgactccaaattcccatcatcaaatgatgccatgtctgttattctacattccctttctgcgacctgaaatttactcccatgacaagccttacacatcacggaaacggaatgtctgaccgtactcggacgcctggaggccagatgctgggtaaaggataaagggcacaaaatggatttggtttctctctatttcccaatcggttcgctcaacctacgaaatgaattacgatagtataaactcatagtggaaagattatgtccttggatatgtcgaagcgatacacaaacagcatggtccttgataccaagccagccaagtgctgtgttcaaataccaaagaaaatgcatcacaagcaacatgaatactgttgaagcattgagtttactaaaggctatcaattggtcttatattctttcctaacacttaaaatcatgcgtaaaaagtcaaattcccaaccataacagcatagaatttccgagtgagcatacggtgatcacttcatggcaactacacctctggctgtcaaccatcaactatatatcttgtccgatattcatatctcattcttctgatcagaaaaatccgtttttcccacgtaaactaaataacttgtgatctagacaaagccgtttggatagcgaatcaaggccgtcagctgttgtggaacatgatccacactgccatgtgggactaatcagccgcaaaagcttgatagataagcgtagcagacctcgggaaagaataaacctgatctagcagctttataaacatcaagactagtatgttatatagaaatccgctttggaagtctcgttaggtagacgcaacggattgtgagttagcaacatagacgctatccagttcaactagcaatgctctttttttgattcaagctttattattcatctcaattgttctataattcgatgatagaaacccagctttccaaaaccaccgtatgcccagtacagataagccatcacctggtccctctcgctgccgaggccagccgagagcaggtgatttgattcttcatgctcgactgatcttaccatttcaagatactctcctcgctggcgccacctttctcgtagtctctcatctaacggctgtccatcttggtcgtatttcctaggtaagtcaaaagaggcaggtatggtagcgaggaagctggggaacgaaataagtttgcagagagccgtaaatgcgccttcccagtcgatgattcccgttatatcgaagctgttttcatctaccatggtctataatcttactatatagaaagtcatcatggactagagggaatggccctttgttgcacatagatagccggctagctatcgctttgatctgcaataggaagttctcgataatcgtaatcatctatttcgctgagatcggccctctctgtatcatatatatgatcgtttctttatcccacttaaacttaacgctatcggcccacgtctcgaaaaatgcggttgctgtgttatcgaatgtaccgccaattccgggtaagggtctacactcgtatccaccctctcggttccgaaaaatcatcccaattttcgggagtcgtaaagaagttaactagacctatattgagaggtaagctaggcaccagccggccctataggtcgactaacatgacagtttgcgacggtgcgatagaaggcttatcggtgctctgtatcacaattgaagtcgtaaacgtgtggcgatgcagccagagagcagccccataactataaaggcagatcccacaggattattctcgtcaatctcatacgcaaaaactcgaggcattggtaactgggaatgctccttgatgagttttattgctacaacttcggattcgagttgggagctgctaacgacgtaagaggtattccttcgaatctgaacccgggctacccagtgagtctcgtcgcaaaatttagtacacggacaatattattgagcctgcttgcaagttgcgacctggtctaaaaccacgcattccaaatggccagcaaacccaaagtaattcggcagagctcatcccattgagtccgatagaaacaatcggagatttgactattacatctttccaggaaatcatgctcggtagtccaaggggttgagctgggagacataatcacggactatcgagttcatgtgggatatcctcgtaggcttctataggaggagaataaaatagagagaactgtataaaataaaactagcagcatacatacttggtacgtgcacgccgtattgttccatcaaatgaaaggcagaggaaatcgagaggacaatcgatccaaaaggaggtatgacaaaccagatctacagagggtacttcattcaaaagaacagatataggcaagagaggagcaagaagtggtagtcctcagtaaatatacatctacaaattatttaaagtagcaaattgtcaaacaaactgtcgagcaatttctacaacatagcatctctggcacgtgatagccctaggtcatgacttgtggggaaagaccaagggtctagcccgccccactttgacgccccacttactcaaacgggccaacataagataagcaataaggcttgaaactgttttgagattgaacaacgacctcgggatataagagatagtaccccccacatattataggcctcctacatggagataccgcactgggctgctagagaggataacctgtcttagcaaatgaagtgctcgatctgttaaatcatgaagtgcggaactgctggttttatgtaggggctacattgttactcctgcggatgagggcagaggttgaacaagacaggactggcggataagcagaaattatgggcctttatctaggttcttacgataaaaataatcctcagcatcaaagaggagccgggacttacctgtcatgcttgaaggagatgatcctcgacgctttcatgcggctgaagaattcttaacttaatatgagatacgatttgtgaatgaatcgatggtggaatgttaccttcgggcgactcatctgagatgcattgcttaaggccacactaactacaccttatgtgtttttattgggtcggcaaaaatatcatagaaatgtgtgtggagcgagggctcagagggaaaagtacagcattgtccctgtggcgactgcgatgtacaaagactagcaacttttgcgcgattttcctttatagcgcctattctaaaagagccaatcatcttctgattactcctcgtctgaattacagccaatcagtctgccgcttccaaagttgtgtctcggcttattcttcccgttttcacatcatttgggccatttatcacctcttccaaggttgaatggcatgctggataagataagccctgtagactcccgaggtccagaagtccataaatatctttctctcgcttgtctcttaacctccatacccaatttcaaaccaattgcagtggaagtcattcactatggaatagcccgactttcttgaccttcctgctcttacccagagcctcaaccactaagcaatcttgattcaagccaacggtgtctttctgcacaagaaatcccagcgccagcttgccttgatttcactggaatcacggaaaagaaacaatggcgactgctgtacctgaaaaatacgtggttcccgctgtcgtccagtccatcgtagttagtgaaatcccaggcagcagcattaaatcttccttggattcgacagtgggagccagagcagaaaagggagaaaaaaaaaacttttttactcgaccatggggacgacgtcagattgggatactctgcgttctggggttcttcggattggccttaacagcactcgtcattgtcctccccatttatttcactaagatctacggctttgcgaaagacactgataactactggagactaccccagccaaatgaagaccacagctactacctcgaggagaatcgacctgtcttcgccctggtcaatttcccggacccgggcctcattcaacacaatggcacatggtatgcctacgggaccaatcccaagaaaaagaacccccacactatccatgtacccgttgccacatcgaccgattttattaactggactcttcacgaggattacgacgcgatgccgactcttggcacttgggagaagaaggtcaatcattgggctccggatgtgattcagcgcgtaagtataccaatgagcattagctcctatccagtatctgatattcatatatgaacttttaggacgacggcaaatttgtcatgtattactcaggagaagccgagaattacgggagccaccattgcgtgggagttgctatatcaaccggcacgagcccactaggcccttacatccccgaagacaagccactagcctgtccacacaagcatggcggtgctatcgacccttcaccgttcagggacaccgacggcacgctgtacgtggtctacaagggcgacggaaacagcgttggacgcggcggcaactgcaacaacagcaagaagccagttgtatccgttccgattctcctacaggagctgaagagcgatggtatcacatccgtcggggagccagtgaaaattctcgatattgacgatacagatggtcccctggttgaggctcctgatatcttgctcaccgaggacggcacctactatctgttcttttcttcgcattgctatgtctcgctgggctacaatgtgaaatacgcacactcgaaaaccctcaagggtccgtacatccgggctgatcggcctttgctgcagactggtgattgggggctcgaggcgcctggtggtgcgacggtttcgactgatgggagcaagattgttttccatgccaattgcggtagattccggtgtatgtggtctgctgctattgatattcgatctaataacaacacgattgttatgtcgaaactcgtgcttggccaggcgtcgaattctacgaaaactacgggaacactcgtgagccggactaggaatagcggattgcgatacctttgagcaagcaggatttactatgatatattcttcacgacttttatgttttgaatttttttgcatctcgcgctgggcgttttggatttcctcatttttgctaaccgtttgtatgagaatcctctagggacctcagctatagctactttttcaggatctatcaaaagccgaactttgcatgcttccaccctccattccttgtttattagcccttcgaacactggatttacttgatttcttcggtagcctctagcaccataaactagccattctccatagaaggtagaaggcgaggatacaaattaacctgctcttttggtactccgaggctaatcaattccacatatataagacagccttgtcagacaaagttgcaaataatatctatcgtatgttgtacattgacattgcatacttcaacgctgaactctccaccaatcaccgatgtcggtgatgacgcgactgcttagtgcctgaggtgtctacatattctcccaccggtagctttcaacctaggaagctttctttccttcctgactctcacagatcctacgctcttataatgcagtcgtttcgaggcgccgcccgagctgcttcacgcacaattcgaacccagccatggcgacaagccaactcccctgtgaacaccgcggggtcgcatcggactttatcggcgccatggaagaccgcacacccattgcatactgtgtcgccgcgaaagtcagcatcagccaccgcagagtcaagtgagagagactcctccaatccagccatgtcattcccctgcctcgatgcccaagaagcgaagtcagcgcaactctccgctcggtcgctgcaatccggccccgaaccttcatacaccactgggcggcacgaatcataccactgtgaacagccgcttctgctcgactggggcggtgtgctcacagaatttgatattgcctacgaaacctgggggcaattgaacggcgacaagagcaatgccatcctcttgcatactggcttgtccgcctcaagccacgcccacagcacagcgtccaaccccaagcccggttggtgggagaaattcattggccctggattgcccctagacacgaataaatatcacattatttgcaccaatgttctcgggggatgttacggaagcacaggcccatcttccctcgatccgtccgacggaaagcggtacgcaacccgcttcccgatcctgactttggacgacatggtccgcgctcaattccgacttcttgacggcctaggaatcaagaaactcgctgcctccgtcggatccagcatgggcggcatgcagagtctcgcagcaggcgtcctcttcccagagcgggtcaccaaaattgtcagcatcagcggttgcgcccgcagtcacccttacagtatagcaatgcgacacacgcagcgacaggtgctgatgatggacccgaactgggcgcgtggattttactacgacggcatcccgcctcactctggtatgaagctagcgcgcgagattgcaaccgtgacataccgcagtgggccagaatgggagctgcgctttggtcgccagcgtgcagaccccagtaagcagcccgctctgtgtcccgacttccttattgagacgtacctcgaccatgccggtgagaagttctgcctcgagtatgatcccaacagtcttctttatgtctccaaggccatggacttgttcgatctcggccatgctcatcagagcgcgactctgaaacgccgcgcagcgtccgaagagcgcattgcgcacggcggcgacgtcccaattggctcagactccgcttgcagtctgactctcccagacaagccctatgaggagcagcccggatcaacctccaatacgaccccactggacaagtccgtctcagctgactcggtggatggtcctccccgggatcttgttgtcggccttgcgcctctcaaggaccaccctgtgcttgtcatgggtgttgcaagtgacattctcttcccggcttggcagcagcgggagattgccgagacactccgtgctggaggcaacaagaatgtcgagcatattgagcttggtgatgacctgtcgttgttcggtcatgacactttcttgttagatctcaagaacatcggtggcgcattgggcaagtttttgcgctagtcgcatggcgatctgcgtccgaggcgataaagaataattaaaaaatttgtaaatacgtcgttcagcgtgcgacatttggcatttagtaggcgttgtacatttacgaaatggaaatgagatgcctcttctctgtttttgtttgcagtcgggaatcgatggatacctccagacagtctacaagtggatggtacgaaaaatgaacagatatgccgatgtattatttcatttgattctaccaagaggttatatgtacattgaactccataaaataaaaggaaactcgccctcaggttgctctcagttttcataaccggcttccagctgtatacacggtccacaggcacgaagtgccatgaatggagccgtcgtcaagcagatgcatcagaattggcttatgttcgtctgagacgaactcatcacagggcgagaaggggaaaagctcataataacacgacccacaaagcccacaattctaaaatatcaccacacccacaaaaaagcagaaaggaacaaatataaaatcaagactgagaacatgaaagtcaggataaatgatgaaaagtaccaaatttcagttgacgtactaggagaacccagaacgtttatagaaagactacagtcacattgcccacaaggccaaaaatccaaaaatccacgagacagacaccaaaagtaaagcttggaagctaagttctttggtgaaagttttttatagaatcacaagacaaaccaggaaacccagaatgtcattgatagtcgaatgattattgttcgccaatgccgcattggagaaacgtcaccttaatggatattccctcgaattcagcagcttaaaggtgcgaaagagaggaagtggagaagggcaggtatttatactgcaggcacagagtgcacaaagggaagggtcgcgtatccgtttgtaggcagagctgttgtccttgaggatacgcctcagcgtgtcatataatgagtggctctcttcaacagggagacgaagcaacctccgatatctatcatttaatcacaatagctgtcgaccgtttttctccacaagaagatggcctatctttgagacttgttagaggctatgcggttaactctttagattagcaggtgtcataggcgtgtgatggtagccccatgaagtcgctgttggctgttgcctccgcgaactctgcattggagatcctaaggtgcaggatatagtcatagacttgtacaaaaatgactggagataaggaattcaggcttggccaatgccttaatgggaatataaaattgacaagaagcactgatgttgttttaagtccaagggattaaacgttcttccgtcccggtactaccagtatactgctttctgcctgaggcaaaagccatttcgatgcctggggctattctactgcatggtctctatgacgttcagttaggaatactataacataggaactgtttcaaaattgtgtttctaagaggtcatttggtgctgcatttcccgggtacttgtgccaacgaagggatgaaactatttgtatttgatctatcgcatcacgcccaagagtcattagaattcagaaactggaccaaataaaacaggcactatgaattcagagaagaagctcaagataagatttctaaccacacattggtaataaacatgccctcagattgaaaactaccatgttttgtcactcgtcaccggcgtgcttgtcgtttccttgaaaggcgtacagacgaagcacatatacagggcctcggagtatgtaactgtattttctcatcactgggatattataggagggaggacatgaaaacacctcacgatgaatatagtactcgggagggaacaggtgattggcaaacaaaaccgaaggagatgtgagatttggagatatagaatatgtacaacacccctaaacgatgttagttgaacacattcaacaaaattccttcaagataacacataacaagaaatatcaaaggtccgagtctcgtcagatctctgttcattgttcaatcacacacttgtgggccgatgtcttcttccaccccgaggtatcagggggatgaagtccatggcccgacgggttcagtcaaccgacatgtcatgaaagctcttgtgaggtttatcgtcatcaagacttggcacgagatattccattgaatctgcattgaagctagagaccagagaaccagtgtgagaaaaacataccttttgtaatggatagcgaataattaggccgatgaacgcgtcgttattgcatcttctcaagcgataagacatagttgccggcattgaccgacaaatttttatcggattaaacatcaagctgtgcctagacgcgactttctcagtcaggctctataatgtgatgtcgagactgatggctacatcggtctgccaacaacgaccttctattgagtgagatgatgcaagagcatatatagcaatttcataagataattggccggcaaaagaaattgtaaagatttcggagatcgcatgagtgttgttagaaatatggtaagcacggttatgagcacgttgaccgcctaccataccgccttacttagtccctgcacaattacctagcaccgcagcacgtgatagccggcgtagtttcacgaatttggcttgcatatattccgttactagaagtccatatctgcggtcggctacttgtcatggtcagtacatcccacatccataatggctcccccagtatcaaaatggtggcaagagcccaacgaggtcgacctcgactacggattcgattctgacgaaccggataccagatataacgaacctgatcgaaacacctcccacgagaatagaagcaaatcgagagatatccagaatacatacgataagggtgtgattgcaagcatgtcttcttggctccaccgtcaggctggtaccccccacggacagcttgcgacagcggccgtcgtatccggcgcagctgtcgcaagtgccatccttgggtaccagtcatacaagcgcaaggaagctgttcacgatctgaaggcttcgatcccaagtatagatgatttgcatgctgcagaaatggtgagatgcatcggtgaacctgcgcattgagtgccaagcaagctacagggcaaaagctgattcggcggactatagctcaccgattttggcgctgcctcgaatggaatacagctgagcaaggaagatcagcgcagtgcagctttagctcgcagagcgcaacagggggactacgatgatggtatgtggcttttctatggcatgcttctgcgaacctatctcactcggctcgtcttgctttgatagacttgattctagaacagctcgcccgcaaccgtgtgttccttggcgatgaaggccttgccaagctccgatcgtcattcattgtcgttgtcggctgtggtggtgttggttcgcatgccgctgcctccctggccagatcgggcgtgtcaaaaatccggctcattgatttcgatcaagtcacactatcatcgctgaaccgacacgccgtagcgacattggctgatgttggtacgcctaaggtccagtgcatccggaggcgattggaacaaatcgcgccgtgggtcatgttcgattgccggaatgagctctatggaaaggccgcatctgacgagcttcttggcccgtggtctctgacacacgacggggagggccgtagaccagattttgtgttggattgtatcgataacattacgtccaaggtagagttgctacactattgccacacgaactccttgcctgtgatttcgtcgatgggtgcagggtgcaagtcagacccgactcgcgtcgtggtcggtgacatctcgctcagcaccgatgatcctttgtcccgcgctacacgccgcagactaaagctccttggtgtttcgtcaggcgtcgcagccgtgttctcaacagagaaaccgggcccgggcaaggctaccctgcttcctctccccgaggatgagttcatcaagggtcaagttggtgagcttggagttcttcctgacttccgagcccgcattctcccagtgctagggaccatgcctgcagtctttggttacacggtagccaaccacgttatctgcactattgctggctacccgcttgactacaatatgggcgccaagggccgcgagaaactctacgataccattttaaatgcattgctaaacttgcatgaaagaatgatcaaacaaaccaccggtcaagataccgtgggactccgcgctcctctcagcaaggatgacattgcattcgttgtagaggaagtataccggggaaagagtgcgatcagtggcttgtcgaacagactggctctcgttccctggcaaactcccgcacatggatggaagatggatctgagccttgagaaagagggacaaaagaccgtcccgatgaacatcaatgaactggtctgtatgacgaaggaggaggctctccgacacgaaaacgaggtgcttaagggtggcaagaaggtggaagatgtatatgatgagactgttctccagcgtgtaaacctgcgcagacgggaagcggaggagtacgatcagtaccgaggatagtgtaaaatgtacaaataaaccaaaaggacaaatatcaagttccaaacagaaacaatataaaggagtcgaacgttacggcctaataaaagaaagcgggtctaggtatacgtcagagccgcgatggttaattctgcctcttcacattcacctactctcgctcaatttcatcaaatgcagcacatgaagcatacagtacactttcagataaagatataaagcctaattcaggcgcaggaggatggcgcctcttgactcccatctgcaggacttcgagaccaacagggcagataacgactaccacccgaccacaacccaccgtccctcctacccaaaacaatttacactttattctcgcccactgattgattccgccagaaacgaatggcaattaagagccgccgcagattcccagcgcgcctccagctcctccgcggatgacatcaaatccccgggatggtcccaaatggctctctcggtagtttccgcgccgcggttccgacatgtgctgatatatgtcgcgttgtttctatttgcatttatcggttggcgaatgctggtttctccacgactacaagagcaaaaatccctgttgcattcacttgatccgacatctgagacagagacaggtgggtggttcgggacaaactcaaaccctcagttcgacggcttgattcagatccgtaccttggacccaaacctggtgcctgggaacatagcgggagtggtctcagggaaatctagtcggaaacggctaatcattgtgggcgacgtgcatggctgtaaagatgagtgtaagacataccccccaagtgcgggaatccctgaaactgacaagcctacaacagtggtgcaacttcttgaaaaggtttctttcaaccaagcaggtggtgatcaccttatttttgtcggtgacatgatcaacaaaggaccaaacagtccaggagtcgtggacttagctcgacagcattcggcatctggtgtccgtggaaaccacgaggaccgggttttgcttcttcgccacgagatggtgaatactgaaacgctcgcaacccccgatgacgatgaagatgctcgtttctcatccaaagaacttggcgagcgtgcagtcgcgcggtctttgagcgacgagcaagctcagtggctggagaactgctcagttattctgaatgtcggccaagttccaggtatgggccaggtggttgttgttcatgcgggtctagtaccgggcatcgaacttgagaagcaagacccttctagcgtgatgactatgcggaccattgatctagatacgcatgtacccagtccgaaaaagaacggcatgaattgggctaaagtatgccttctctttctatttcatttcttcagtcttgtcgtcatactgacataccttcaatctagatgtttgataagcatcaatcaaaattatactcgagcctcgagtcttctactgaagatccccttgcaggcaccatgactgttgtctatggccacgatgcttctaggtctctttccatccgcacattcacaaagggtcttgactcgggttgtgtgaagggggggaagctcacggctttggttatagaggatggcggaaagcaaagtattgtacaggtgtcgtgtcgtggttatatcgaggaataacaattctacacgattgctttgggtccagcattataggcaaatgtattcttatgtggtggctaaatgacatgtgatggaacgctcaccattatgaactaggtatggcctgtaggaagtcaaattcagattgccggcttaaagtttgattagtcgaagccaattgtcggaaaaataagacaataaagaatagcaccagaaacctcggtggaatcgatggtacgaactgttcaatccagcaggtgcttgatcaaccataacacagagagtaatgtgttgatccacgcggatgtgaacagaacagaactgtagaatatagaacttagagcttactgtatgagggagggactaagcccctgagggaagataactagtattaccaaagattccgaggtcagagcctatacgtcgcaaatctaccaagaatatctgtctaatttcaagaagcatgagggtatgtacagggtggcactatggcgcagttctctatccggacttggattcggatccaggatcctcagggatctcagaatcagggaaaacaaaattaccatcagcgccccagacagcaggtggagaaaagtcttcataccaaagaccgcccaaagcattagtgtgaacgagtccaaaacggaaatactccacctcgtcgggataagtgcgagcccaagtaaaatctggaaaatgctggccatccttaggtcggaaaacctggaagcgctcgacatcgttgaccaaaacactcaggccgtcggcatggggctcgaggtccgggaacgaaaaaacgaggttgttcgcatccgtcgtggaaggaggatatatctttggtggaactgtaccaagtttagcaccatcaaggagtgcgcctggagtttggaggatggaatcgaagccccagcgggcgatgccgtttatgaaaagaccaataagaatacctgagtataggagactgggtcgcgtttgcagagttgttccaggtaggaagagaagagagagaatgtaatggtggatgcgtaggttcatgttcggaacggcgacaaggatgagaacaactgcaacaaggacgccgtagatgcttatcgtagggaagaagcggccttcgcgacggtaacagtgtgcttgaccaaaggcgattacgatcaaagacccaactacaatgatgagagctgtgagagcacccggttgctgctggatatcgtgaggtgtgaggcgagagattggaatgcgatcaaatgtatccgtgttcagggcgccaacccagcagccacccagccacaagacggtcttgtcccagtgtgcatccaaatttttaagcgtgtaccggacgcagaagtaatatagcacgaatcccacaaatgcgccaggcaggaatcgaccgagcgcaattgacacaaggtcataatagctcccgatcgagggcgggtcggacgccatagcgacttggaaccagacaatgaaatacatcatggagtagaatgccggtgctgatgtcacgaccaatgataagaaggtggtccagatcaaagtgaaggcgaagagcgaccaacgcgcatcagaacacttgatcggtgttgtcttattcgagtctggggatgaggcttcattctctagtcggaatgacattgggaagcttgagagaaactcgatactttcaattccatgctgcatgatagattggaagtttttctgctcgccggtgcggtgcaggataccacatccacccctcgcgtcatcaattagaccagcatgtagtgctgacgcgcaaattgacgaatcgccgcggtaaatgctgctgttctgatcacccacctccagtggcttacctcccacgactaacggccggtaattgagctcctggtcgccaacaacatacggctccagaagaatcgccgccgcacagcctgaggggcagcggaaggcgaaggattggtcctcgaatgggcgacaaaggtcaccattcagtccgcaattcgtagaattgctcctatatagatatggtcaggttcacaatatcaaatgatctacttagatataagaatagaaacacaccatagacggtggtgacacgaaagcttgacgggctgcccaaaccccggaacctcttggcccgcgacagaagctttgaagcacgcgaagaacacgacaatccaaaaaattaaaccgccaaaaaggagcgcgatctttgaactcttgcgcggaaatttctggtcaatcagacgcgccggcgcagcctgcaagctaggaaaccaagggttaatgtgatagacatgcggcggcgtcgggccgcggagccaagcgcagaatcccgagggcgtacaagaaaacggcggatcacgctcgaatttccccgattgagcctccatgccgtcgacttccgagggcagaagaggcaggttgcctgattctaagtccaagctcagttcatcgctgtcgcgggcttcatctttgtaccgcgatccgatctcctgcaagggatactcggaggtcgacaacttatcttgtgggggtgatggcgcacttgccccagcagagtccggtcgcgactgcatttttatatacaaagtctttacctgagctctggcgctcttagcgggaaggaagtgatggaattcctcatgttcaatgtcgaactagcaaccttgttggccctggaatttcttggcttttagtcatccgatatcaaattgtggaccctgaatcccatcttggacgtgttcaaagatattaacattgaatgcatagtctagtcaagctatatgctgtgaatgtgtctcagagtgtaccaatttagtgtcatgatctactatagaccgctatcacatgcttatgttcgcttgctggcttactatttacatagtttactagttagtttgcatttcatggattatttgttagatcgctaggctttgcaacgtttgtagaagcgccagctatatgagcaggcaatctcctgctcctgcacttgcttcttctttccttttccaccttagtcaccacgttgaatgcactccttctcttcttcagatcgacctgacgcctcacatttaggatgataattctaacggtgacgttgccgccgactctgttaggtctccgcctcttgatagactacaatgggtagtcaataaacctagtcacactccctattatggatataccatttagtaaatagtgtcagctccctatctaagtcccagccgatagaaactctaagatcatcccgtatcaggtagcattcccgatctccttcccccgctaagtataatagtaacaagaaccctttgtggaggttgcgaagccgatcgccactaagtcgtctcaaccaaaatcccctcgaccaaagctgatccttcctctagggagagagacctctagaccggtgaatacagcagcagcagcagttgccgctaacgaccgtatagggtgctacaatgtttagtcttgttttttactgattagctctgttctattctattaaaattctattaattagttcggcaaacaacaatccggtacctccgcatatgtatagacaatacatctttctagaagagataacctcatccagttcagcctacaatagtatgtatttctatcgagccaaatattctttatttcacttctttctccctgggctcaaaatacccatcgtttgagcaccacattgctctaggaatgtacagctaacgtacgttccatccggatgagaattacttgtttgtttcccgaatttctatcaagtcaggcattgcttatattctttagataacctttctccatcttatagtacaacttaatatgtccacctatagataagcggaatgaaagagaaagatctctgtatcatgtggaagagttgcttcttataacacaacctattcgttgtgaagatagagcactagtgagagtgaggaaaaaagacattgttcttaacacgcaatgtaatgactgttgaatggttgattgacgttgatgatatgtggaaaaaaggcacgtgatatccgcaagctgtcaagctcatgatttcctcattcagatttcttccctgccaacgcccacgatacccgcgtttttcgggtcgctgacttggtcaatccttcatcatggtgagactcacacttatcagctcaaatccacggggaaatccccatatccatgtcgagtcacgtcttgctaattcaagcccccgctatataataggcacgcaacagtgaaaaagcgcagtctatgctgttccgcttccgcgcgcagcaagcagccgacctcggaatcattgatgtctcacgcacccgacgccccaaagcgatcacgtccatcgatacggtgccagtatgcgagcgctggcgcggacaggtcgtcaaagaaatttcgcgcaaagtatcacgcatccacgtgcaaagcctgagcgactaccagatccgcgatctcaacgatgagattaacaagctcatgcgtgagaaatgggcgtgggaaatgcaaatccgcaacctcggcggaccgaactacatgcgtggatcgaaccgactttacgacgatgaaggacgcgagatccccggcggaggaagaggctacaaatattatggtcgtgcccgggagctgcctggtgtcaaagaaatgattgaggctgcggttactcgcgcgaaaggaccggcggaggaagaggctgtgtctggccgcggtggagatattgcgacgaggaaggttgatgccaactacttcggctatggtctcgatgaagaagatggtacgttattggcgtatgagaaacagaaggagaaggagtctgttgaacacctgcgccaccaaggagaggatgatgctgaagatggctggcaatctctacctggtgatgcgggcgacggggtggaatggagactcccgacgctggatgaggtccaggaagagcttgtggataggcggcgccgccgccttctggacaagatctcttgatttagatactgcgttcaagattccctgtttctatttctgtcctttgcctgggttcggcgttacaggtgcttgtgcaatatctccacatttaaggcatcattctctgtttcatcgtaatgacaccacttgatcattatttccaaatatccacaatatcccgaaggcggattcattatgtacaatattttacagatcgctcgttgttgcatccggtttgttctttcgagttgtcctttccactctcaaggcctgcgtcatgctcatgcgcggtgtttgcgtaggatctccccgccgttgttcctctgcttctaggtcgtccaccaaaaattgacctagctctccttgtctccatttctgtataaaaagaagtgcggctccatccatcattggcaccccgccttttgcgagcaggccagtttggcgcgcaaagctttcaattaatggaaccacatcattggtcggttccgaccagcgcttgtatactgatggatcattcaggtttatatgatacaacaagtaatccgccatggttatcgcggaaatgacattgtccttgacacagccacagagagccagcttgagcatattctctgcttctggaacatatggcataaacactcccggcgtgtccagaacgtagacatgtgatccgttctcacgatcaatgatcttcacctgcgtggctaccttgcgtgtgataccgggttgctgcccggttttcatagccttggctttgcccgtgcctgagttgcgtagattgttgatcagtgttgacttgccaacattgggcattccgacaactaacactcgacagcctactaacttatcgggagcttcggcgtcggttcgaaggtgcttgatgatctggctgacatcttgccgggaggacgagctggtgaaaaacacggcgctctttggatcaaaaccttgcagtttgcgttctatctacagcacttttagctgatatccagcagtggtctgttatctcactgcatagccaagaagaaaatacttactattttctgggcagatgatctgggagtgcttcccagatctctcttagtgtagacgaccagtcgtcgcatcttgcccaaagcttcctcaaacatggggttgatcgaggtcacgggagctcgataatcacgacactcgacaacatagtcgatagttgagagcatgcttttcatcttggtcagaccagccctgtggtgtcctaagaaataggaccgtggaatagccccataatgagggaatacattgcgcggaacgaactgggccattggagctcgttgaaggatagtgtttttcagtccggtgaaatatgattcatcttaatcggagcggtggatgatcagtctcaagggactggattgattcaacaaataaaatcgctggtccgcggaaggcaacaaaaaacccgtcaaaatgtccagggcggaagggcgggcggtgagtgaatcatgtgcagcaacttagggctttgcagacttccgtagtgcttcattctggagattcatgtttcctttttgcgcgagcatagctttccttctaattcaagctcaacagaaaacacaggttaggtcaaccctacttctaataataatttggcgcgtggtacgttcggctgccgagcgggagatggttaccaaagcccgccagagcccgccagagcccgtcgatgcttgccaaagcccgttaactgggccccctagatctctaccactgctactttttgtctaaagtgatcaccgtggtttagccgtgtatgtgacgcaaacagacaaaccccgaggcagccctgcctctcttgtccaaccccacccaatgtgtctcgggatttttcgttctacgtagctcaattgtcactcattttccacttgtctttctccgttttcctggtcggggtttccttctgccgtatgctccgacagcgtcaccctggaaggctcattgaccaacagtgtggtggctggtccacccaggaatcatacgggtatcttttgtatcagacttatgcaaggaatactgccagtattctcagagcacaattcaatttgaggtccaatgtttcaagtatctttctcagaatataatcttcctattgagcaacgggatcaaacacaatagtcaagaatacttcatttcttgattcgccggtccacgacagacattcgtaccatgaagagagggactatatgttgtggtttttccgttcttagtccgagatcacacctctttagccttaacccgacgaagatgtgcagctgtagaccaagggaaatgaccaacgggaactattagaaaactgttattgatatcagaaatagccgcaaaggcattataccaagccgaagacgctgccaaaatgccaaaaataccgcctgtcctctcaagtgcaaccggaatctcgccatgagagttgcattgaatgtgcgcaatgccgagtagaaggtagttcatgtccatgaaaaagtacagagagaacatcgcaagattagatttgagagtgcacaagagcatcagtgtagtgaagatgcaccagccctgtatacatacatcgttctcagtatcttttcccatgatagtaaatcttgaatttgatggaattggcttaccaacatgaacaggcccattaagagctcgttctgacatagtggatctactgtacttcttgtaaaatcggtatcgtcgaaagtcgagatcagagaaaatgatatccaataggcaccgaaagaacaaaaggtcgtcgcaccaaaagtattcccagccgccatttccctactcttattagcactaggcaacacacaaagcaggataggacataccacattccagccaacacctgcgctataccaccataactcaaagccaaggacatactgacccctgctactttcatacctcccacattgagggcgacacaattcgagaggaacgatgtcaatgcaaatgcacatagacccaggggagcgggattggcaatggtccgaacgttaacaggcaaagactgaagttccagtttgcacaatggtataggtgtctccggaatatttgatgggggcggagagtaatcacggctggcttgagacaccactggggagccaatcttgtcctgcgtactcggctggatgtgatggtttgatgcagccttggttctttggaccgtagtgacggtaatagtatgctccatcaatattttatatgaccaaatgctggttttgtgttttcgggaagccgtttagaggaaattgaggaataatatggccagtgaacagagaagaagggcaatggagatacatatacatatatatatatatatatatatagtctaggacgtagatggtacatacctctagaaagagcactcgaccttggtactatcccccagtgcacaagcaagctacagccaaaccccgttgaaatcgaatgatttcaatattccggaggttcacaaaagtggagtcgatttctacggggtttgaactgtaatccctcttccgcatagagagcgtattggattccccgaatccgggaaatatatacggggaagtcgtcgggattcgaggattagcattagctaataagaagcctatactcgggtagtgccgcgagaaacgggagctctatggcatgtttcactcgatcatgagatattcaaagactgttcccacaataatagagcatcttgcacgctgtgcactgcttaaccaatttattacaaattgctagcacgggtcaataccgtcgggatcgaaactaagaagaattaccaattacttcctatatacggagtacatcgtaggtatatgtgtcgttaatgtggggatgataacttgcaagacgaccaacgcactagaactgggggtttggcgcttggctacaagaattgacttcaccaaagtgcagtgatacctgtaagatataatatttgagattcaccaaaatgtatatgcaggctatacctaggctaggagtgccatacaacattggaggaaatgctaggaagttctacttgctccggatgtcaaccatgttgaatctgccggaggcttgacttggctatatctatattttgcagagcctactcaggctcctgtgtaggcatcgctcggaatttcaacaaataattgctatccagacaaaaaaatctagattgggtatcctggcttttataaatccatcatattgcgccgcatgtcatgaggaaagaagcagaacccccatctcacgacatcattcccaaaacgccacaatgcctgtggtctggaaccaaaaaaaaaaaacaaaaaaaacaaaaacgaaaacaaaaacaaaaacaaaaacaaaaacaagaacaaattaaagtatatgcaagatcagcagggaaattccttacacatcccaaggcgcacaagccttcaaagtaccagagcttatgcccgccagccctgcacaaaatcgtgcaagcgatcaatcacaacaccaaatatagcattgacactgtctgcgataagttgctcgaagtggcggatggcttcttcctcggtcatctcgagatggaagcgctccttcactttcaggacggctttatcaggctccactcgaatatcagggatattggcatcaaccatcaaactgaagaggttaaggatcagattggcagatttccgcagcgtggtgtaagcagtgtagcagtactgcttgaactgcagatattggggcgaggttgtgccgcccatgccttcgaccatttccttgcaaagtttcatcatgggcgcaaaaggcttcggatcacgaccaaggatgaacccaaagtcagcgtggaagaagtggccatctggtgctagaagcaggttttcaagatgccggtcgccaacgccgaggaggtacgtgataacgcagtatcctgcacatgatttgacgtatgtatccattgcttctttgcgaacgccaagaggctcattgtcatctgggttgttggcttgtagataggcaaggatggatttatacttggcggacgccgcggagagagaaatcgaggggatgaattgcacggcgccggccgttgcgctggtggcaagaattcgataaggagtcagtttaagatcaaggttctccttctgcaaaaggcgatccatcaagatgatgatctggatgaccaattggtcctggcgaagatcatcaccgactttgaacagcatcggataacgacgaccttcagaagtcttgaacgtgataagcaaaggggaaagagtggacttgaagacgttggattcctcggggtataatccaaccactgaaacatcgggatctaaaggtaggggcagcgatggatctatgttgatcaggtcgttatcagggtcacggagatattttttcagcatctcaatcttgccgactctgttttcgcgtgcgaagcgtacgtccttggctattttggagagcacagccaccatttcaccttggcgtaatagtgtctttctgtgctcaggatgaagcttctccagttcaaccatgaagtagtattcaacccgcgcaaacagccgacgctgaattgcatcagcgtcatcaaattcgaccatgagataccagtgtaggtagttgccaagcttgaagttattagccgcacgcgaaatcaagaaatgtgcaagcgaggactcctgcggagccgcatcaggttggttatccggagttgcgtcatatttcagagcttgcaccaattgaagaagataaagaagcaattcctcgtcatctgccttccgcagtgtttccacagcatacgaacggaccgcaggattatcaaaggtgggaccaagaatctcaagagcgtcgtcgacgtcaatctcggtccatttagggaacatttcaacagcttgccgcgattctccaacatcccgccagttgactgatttgacgaattttgtcaatgccttcttctcgcgtgtaagatgatacctgaaacgccacacaagatccttctcttcagcggtgaggtcttgtgtcggttcataggagataatcatattgagatcatccctgatctttgggttgggcttcaggtcacgatccatgatgccggttcgatggctacggatcaaacgccggtgcttgtcctcacacgggtttccgatttgaccaacctccggatcataaatctgaatgatattatggggatcggcgtttgagattccaggtccaaaatgtacctccggaactggcttgagggtagcattggggtgaggaggtgcattttggggccaggaggaaatgggcggaggaggatactcgtgatcggcccacacaatgggatgatcaaagcgtggaaattcgacgtagaggtcgaaatactcatcttcaatgttctcttcgtcagagctatcatcctgatctttgacgtgtttcggatctttttgtagggctgcatgaagttcaagcgcgcgcttttgagccgcttcatctgcatttgtcttcagtttctccaactcccgaaagagcaattgatccatccagtccacacgtgggatctcccccatttcgtgtttcttgatcaagacttcgactcgttctagttccgcttcttcgggtgactgctgtgaaggatcacgggtattcggcttacgacgcttaggtggtaaaacagatggggtagaggttgtagcagagccgtctgcgtccttgtgtaaataaaccttgcacttttgtctgcccattttcaatttcccgtcttcatcaaacaaagtgattgtagttccaccgaatgggacgtgcgtaatcctatcagcagcgagtggggacatatcaacgatggtgattgcgagctgagaattacgctcggcatccttgatagacatgggcatctccaaccattcattccatacgcgggcagttttgaaggccttgtatttggtcttcatgggcacgcccaatggcttcgactccgaccatatctgagcggtcacatagagatcggaggcggggtcttggacggaggcaatatgccgcagctcggcatttttatctagaacggtgcatggaatcggcttctgctttccctctaacgaaccactatagatgtgccggcatgagaaaaagcccaatgcttaggaatgtggaacttacatcttgatgcgtattggtatgtccacttgagtggtcacggcaaaggtgaacgcttccatctctgttccccgtttggagagagcaacaggtcgctgcgtcatggccgataagcaacccgacgtggggaggtcacgtggaaggtctacgcgacgcgacaaggcgttcgcgatcactaaatggagccacacgtctttttcctctatgtatttcgaggtatactctttgtctaaattgggctaccgtgtatagttgtactcgattagttgcccacttttttctttgttaaactttctttgttcccactctcatatcatctcgcactgactgctgatcgagtatggcacgtctcattcacacaaatctggacgaagcaaacaccccaggtcccggcccaacatcatcaatatcaccagactcatctacttctgataaagaaaatcggtatcaaggtaataataagagaactaccgttgcgatgccaccgcatgcacagggtaaacgacggcggttaaccgaccacccctcaaatacccagtctgctcgatctgctcagtctgcccgatctgggcagtcgcaagcatcgtctcaacgaaccagcagtgacacacgatactatgaccctgatcaggaccccgatgaacggagaattgtacggaggggacttcgagagctgggtagggagctaaatggtaagttgctttggctggacttgagactcgggtaatggtgctctaacacgtccacgaagatacgcggggcgagctcatgcagcctgggaatgatggtatcctcaatatagttgaacaagcaaatcaattctacgccaaagtgaagcagaccgccgacgccacgctcgattcgcgcatcctggtcaacaccgccgatctaacgcacaaaaaagccactcagctcgctctcggcgacacctctgctggtattgatgtagacgagtttgtctctaagtgtgtatcgttcatgcgtcgcggcccaaacaatgcgacggcttcaacacagggacgccgagggcgtcttggtcgaagccaaagagaccccgatgccagtgacgaagatgatgatggtgatgcgatgaattgggacacgcttggccgatcggcctgctttcctagcaatgctcgtccggccgtgtccggatggttgctggggccgctgtcagtacagaagcgtacgcggcaaatgacacagcgaagagcagcagaggttattgatccgtcgcaagccgtggcacctcgagaaatggcacagcaggatcttggtcaacaggacagcacaaatctgacccagatctgttccgagatcaacaagctgcttgccacgaggcagcgtctcagtcagcatgcagttgagacagagcttcgcaacgaagtcaatctcacaacagagaaagcacaaaaaatcatggacaagcatagcgtagcggacgacggaggaattcctttgtttcgcttctgtatcaacccacattctttcgggcaaagtgtggaaaacttgttctacgtgagcttccttgtgcgagatggcacagtgggtgtacaaacagatagtcgtgatttgccgaccttgcgtgagtatttttcaacatgactggttgatacagcactaataggttgacagatgcgtccgcgccgttcgcccccagtgaggcccaaaagaaaggcgtgcaaaaacatcaggcggtttttagcctggaccatgatacgtggcacgaaatcatcgatgttttcaagattaaggactccatcatcccccaccgaaaagaggaggagcaagagactggcacaagttggtatgtctaagcttcttctgaagacacgattccacgagtcgatgtgtgttttgcaagatacccctagatcttttgacttgtatttctcgatgaatttaataatctagctttatactttgaatatgtcgtattctgtggcatctagcacaatcacgagtgcgacctgtaaagacacaaattggaaatccacaacgatagacctatactccttacttagataggatatatgcccgagatctatttcaaaatgtaagccacctatatgtacataactacggagtacataaatacggagctattaagacaacaactatgtaggcctggaaccctccagggctgcccaggcgggccgtaccaccgtccactctgacaaagcggataactaagctcaggttcataactacgtcattatcaggctgtctggcttcccagcgaacttctgaagactgatccctactcttcaattgtttaatatttaagaattgaaaatttctctaatttgttactgcaaggacttgaagatctgtagctccaagacacatcaactgagacatccaacgccagggaaaacacaaacaaaatcaggaaagccgccaaaatgccacagctctttccagccaacccttcggcgactatggtaattcgccatgtgacaccagatatcgtgaccatgagtcttccttttgcacggttcggacgcctgcagttcggcgggcgagggacattgggtgagtgccgactctacagagccaacctaccaggcgcatgatacacctggggacaggggatgatgtgcagtgatttcaagcccatgggggtccttgtttaagatctatgctgactgttcttgcatgcgacagtcaagcttgccagcggctccctcgcagtattctctcccgtcggcctaacgtctgaagtccgcgagacagtcgagtccctcggcggaaacgtcaaatacatcacggcgccagatatcgaacatcacctcaacctcaccccgtggaagaacacatacccacaagcagagatcctagctccggagggtctatacgagaagcgacaatcaaacccggaattcaaggataccccgttcaagcacgtattcaaaaaggaggatcaactgccacggtcgatctcgaaggagttcgatgccgagtttgagagcgagtatgtgtatggtcacgggtcgcgtgagctggtgtttttccataagcccacacgcacagtcatcgaggcggatctgctctttaacctgcccgctaaggagcagtattccaggactcccgaagccgggactaatttccttaccaagctgattatgccgctgttgtccaccaagccaccggctacatggcagaggcgatttgcatggtatattctctcgtcacaggatcgggcggcgttcactgagtctatgaaaaggattgatcagtgggactttgatcgtttgattccttgccatggtgatactatcgagactggcgctaaggggatatttcgtgatgtgatggcatggcacttggagcagaagaatacgtagtcttctttatcgaaactattgtaacagatgatactttcattttgactcgggtgttgtggatgggattgcattggtgtgattttctttttcggggacgttgtaggcagcattattccaaatttgatcttctctcttggctctccgaagtgggtatgtatactccatacatattctcattcttgtcgttgttgctattcatagtatccatggcccactgataggtcaaatagtaaactttgcatcgcccgcatctttctaggatcttcctgtatgtatacgaatgttcattgctgcctagttctgctatttccacttctcatacgtgaaatactacctactatgtagtgatattatactcataaaaaatcgtatgtttagctgtcaaatctccgtttccccacgtcatagggctgagaggaaaaagcaagtcagatgactcaaattaaacatgatgtcagaggtttaaaggtctctacgctccagcccctgtcacaaggtacggagtagagaacaacatccacctgtcagacagcaacaatgatcgccctgggtggagcccaacccaaatcccggaccaaactactctgtagagctatcggcaatagtcgctaggatcggcagtcgaagagcaagccacggaagtatacaaagtattccagcaaagaaaggcccgtattccatgccagcacatcgggtggttttctagcacggggaggctgggcctggggaagacaaggatgacgatatggttaatttggtcgaaactgcgtggccctaggctcgactttcgtggcatttccgtctgctgctttaaccagccacaatcatgtatgtatacagctcccatcattgagaggaaaatcttataacgccccctcagaatgaaaaccagcgcacatttcttctcaattttcttacgcgcattgggaccaatttgtttatccttcacatagttactaacttctcaaaatgactggtttgctccaggaaccgagccaaaactgacttcaagcgtcagaccgagaaatcggtttgtccggggacactttgcggagtccatcaagctgggattgaatctgatgacaaccctagctaggtacaacagagctcgatcctaggcaactatagcataccactatgatcagtgatacatagtatacatagtatagatgaatagactgagaaggctatcgaaagcattcaaacatgttgagcgttagttaatatgagttcgatggttagtggtgtaaagacaccacagtcaagaccttgacctgcctccgtacaacatcctgtattgagggtactgtacatgtacgccttcattttcctgatggctctgtagggctactccttacgccgatcgggtggcgattggcattcagccacagtccacatcagcggtcagtccaccacgaaaagccgatctcttacccattcaagcctggaaaacggttaggcacgttttgttcacaatttcgaccaatcgtgacctctgcttgttggaaagaactcgctgtacgaagtatacgagattgatctgacgacaccaggaggcttagattgactctattggtcgcgcctaatgcaagctgtgctttgtcttgaattttaattgaatttcctttttctaatttattgacttttcacttcgtcccttgctttaaaagacactgtcgctccctctcgaggtttgctcgtctgtgcaacctaacacgttatatagcttctcgcgttccctaacctcttatcccacaccatatcttcacgagcttgacacattatctccttatacaatcacatccttccgatttatgaaagaaactgctcattgatctgacaactcaaaaatgcccgtcatttcacgcctcgcgtctatcatcctccgcgttgcggagattgcctttgcagctgtgaatagccctgatcaagctcaacttattgaccgcatctgactctgttctaggtcgtcgcaggtgtcatcggacactaccttgcccaggttaaccacagcggcacagatattgactggtggcctcagtcgcgatggatctatactgaagtaatcgccggcttatcgatactgctgggcctcatatggctgatcccgttcgcgtcgggattcttctcctggcctcgtatgtgctggatatacctggtgaatatggagcaatacttactggaatatagtggacatcctcatttcatttgcttggttcgctgcattcggtgtcctcgtcgacaccatccgccgcctgccctgcggcagcatctggtcctggcactttagaggggaccagacatgtggtcgctggaaggcagctgaggctttcagcttcctttcagccattgtctggcttgcttctggtatcgtggtatgtgatgagatgatacaacccacatgtgaatacggactaagaaactctcaggggatctggttcaccttccgtgttcgccaaagcacctctgacggagtgtaagtaaccaatgacatcttctgataatagcttcttgattgattgatactgatatactgaacagtcgccgccgccgctggggtcgctccgccgtctagatgttagcatcggatcttcaaatatctgcatggcagacggtagtccgtcatacactaccgattatgcgcattgcgcctcccgttcagcacaggataagtgacatggatgttttaatgatattcttgcttctttgttttcctgctttcctctaatgtttctatgtttgcctcatgatctggaggtcaacgaattacgacttacgttgatacccttggtgagataatctattagtgattttgtgaaatccggctattgagtttgctgttctatcgctttttttcatctattcttaatatatttcttatttggacatcattgtctggattgtacagcagctacggacgttgccaatggttctttttacatccacacaccctcatctagtttccaattcccggcccaaataaataacaaagaacaacaaggccatttttctagatctatcagtccatgtgtttcatttttcgtctttgtcgtctttcttgttttcctttattagcttttttattcattcgaaataataatcttaacattgttggaagtgcaacgtacgaaagatataaatacgccaggtcgagccatgatacgttatccctcgagccgaagcagtttttgaccatccgttcttgaccttcgagttaggaattcatcttccctgatcagcgttgccacagccttctgctggcttcggatttctgctatcactgagaagccatgtcagtgatgctagacaccacttcggcccggctctttcataccacgcgcattggatttcaaacccgctgccagcaactcattgacgacttccttcacgatggcttatcgcttcaggatgaattccatgatagggttgatcagctccacctatcattggaacaacttaagcgagccggacagatgatggccattgattgttcgacaaatgagcttgtggctgttgtccctattggatttttcaccgtcctgatcgagcgtcctggccaggacccaatggccgaatttgattgggcctgtatttacaccactgacactttgaacatgctgacgagtgagtcttttttgcgccacagggcccccgctgatattgcccgcatcctcgagacgcagtcattcctctgggatttggttgtgccgtttcctgtaacgctttcctgtgccgaggattccgccccagacccatatgtgaatgctcttcagatcccccccgctgctagtctggctcgtatgaactctcagattccggtgaggcctcgccctactcctcctgttgacacttacatggcttacaaccggcccgtccctggtccttatccccctgctttgcctccacgatctgtgtttgagtcggagcccgagtcggatggtgagtcccctacaggcgctaacgctgtgggtctttatggaaaccccagcatgcatcctcggtgaactcttgttattcctgtgttgatttccatcattcccagtgttcgagaaccataggcacttttcgactttcagtagcaaaagtcttgatcaatgtattgagcttctcctgccagaactaatggatgcggtggaaggctaagccacccttgagataattgtcatcctgaagatgtttctatcaccagatcattccaattcttcgataggaagctgtagctgtccttcatcggtcctctgaacgtcactagaagttaggtggacggatttgggcatccaggagcagggtggcaggaccctatgcgagttgccgtacatggtgtggccagctcattagttatcaatcccctagtaatagccaagcgtccttgccaacatccgaagacagaacaccgaacaaaatagagggcttagtgagttgttacattctcgacattgtagatagtctagtccacccgtggagcatacatatttactgatgaacacgaaactgaaacaaaaatgaacgccggaaatcgagaccaaggaataaaagcttggcctttcaaataatatgagcaagcccgtggccagctgaaaagactagaccatccctttcccaaatgcaaataaacctcattaaaacatccctccgtaatcaatgttgcaactccgagcaggattagcctgctaaacataaaccaaaccctccctattcacaaaaagcccttggtgttgctgggttgccgctggggaatgtcattagatccatagacaccactcccgcgacggcttccagtatcactgaaggtcacaccacgcccaataacactgcctcgctcaacgcgcagggctttccagccctccagctcgcgttccagccgcaatgctttctcacgctcctcgcggagatctcgctcggcgcggcgggccagcagctgggcgtccgagtcattatgctgaatctcctcgatattgcgaaggagccgttcaatcttgtcccgagctctgttgacctcgtcagtcagctgagtgttcaccttgtctcgcctgtcaatctgggattggagatccttgacggtgcgatcaacattgcgaagagagcgctgctcggagctgtgcttgctttcctgttcttcgaggtgggtctcaagctgaacagcagggttagtacggaagtcacagagactgagcatgaagccatttgaacttacctccttgatccgcttatgcaagaagcgaacatcctggctaccagaggaataactcttggtttcgagatcgagacaccggagttgggcttccttcagctgcttctcaactgctgccttctccttgaagagctgagcattagcctcccgctcagcagtgacctccttctgcatttcagttgccagggcgtctgcacggcgcatctttccaaccgcggcggcagaaacatcttcctgctgcgcaattctagacttgagctcaagaagctcgcggtccatactggcagcgtttcgcatagatgggctttcacccttggcaaggtcctcaagtcggtcgcctgcttcggccaatcgaccttccagcatcttcttgtccttcagaagcatatcacgctctgcttgaacatcctcaatggaggtccgaagggtgcgcacctgggataggagtgagacaactttactctgagcctcgttgtgtgcgttgacagcttcgtcacgagaattggtgacatcttgcaggacaacatccatccgagatttttccttagcccatgttgagctattgagaacttcgttgtcccatttgctgcgaagattctccagctcctcacggagacgagaagtctctccacggccattgagaacacgctcacgttccatctcgagttcgttgttgagagtagagaattctctctggtacttttgtcgggtctgctccatggaggtctccttgtcctcgagatcaatcgctcgctggttgcggtaatcttcgagttcattctggagacgttgcttagcctgcaaggcaccttgaagttccgcagcttggtcctccatcctagcctcgagggactgtgcctgtcgctgcaagtcctcaacaagcgcatccatctccttgcgctcagacataatctgagcgcaggtttcttcggcttcttgcccttgggatttggcgaactgctcggcgcgggaagccttcataactgcaatttcggcctgctcgagtttgttgaagtattcatcggagcgactcttgtacaacatgaggcttgactccagatcagccgatctcgaagactcggcatctaggcgaatctggagatccgagaattcctgaagaagctggttacggctaactgcatcttgctctctgccgacttgcagctcttgggcctcggaaagggcatcacgaagttcaacctccaaggtggctctggcgcgcttcaacttttcgaactgagccttggcatcaccaaattcagtcatggtttcattgtgaaccttgaggagtgagcgcctagattgctcttgtgagttgataaggtcatatagttcttcgtgcgatttagcttgaacgtcgcgcagggacaattctccggagcggatgctacgttccaacgatgaaaccttcttggaagagtcgtcgagttggtcgtgaagacgaccattctctcgctcgagaagctgcatgcgacggattgacggactttcgtcctgccatatatcggcggtgggagtagagcgtccaagctggctctggaggtgcttgttttgcatctcagtcatctgaagcttattctgaagttcttccagttcagcggctgtatccatacgcctttgataggcctgtgtgtccactgttcggtcggacctcgcggagtcattcggtgcttcgaagacattgtagcgtcgattgggagtagtagggttagaatatttcttagcagcattttcggagttcttcctgaggtgagccggggtacggttgttggtcacttcgttttggtcgatctcctcgagcaaagcgcgcttagatgatgaatatttggcgtcgagctccttcatttcatccccatgacgtcggcgcatttcagcaagctggctctccgctcttgcgtacttctcctcggtaaccccaagcctgttttgaacagtttcaaggacttgggccagatcaactttcttagaaaggtgtggctgaacagcctcccaggattgagctggctcagtagcctcaggctcgaagaccttgtgtaataggatcaattggcggtgtaagtcctcgatctctttgttcgccctatcaagtgtgccctgggtttgacgggtattagcttgagcttgattgcgaagttgccgttcggtttcgagctttcgattggcctctgctagttgcaggttcgccgctgaagcagccttttcagcattacgactggttttgtgctcgcgattgacctcatgattcaaatcctccaaactcagcgacaacttctctttctgcttctccaaggatcttatcatgacctgcgagtcttccaactgacgactcaatctcttggtctcttcgtcgagcctggacttttccttttgaagggttgtcaaacggagtcgattattatcactggccttcgagtttgatcgggcaatatcaaggttcttttgctgaatcttcgtcaagagtgacttgttatcgttttcggatgcagtcagcctgcctctgagagtcacgagctctcgttcaagacgctccttgtgctgatcatgacgcagacggaagttttctgattcagagatcgagtgcatgagttcttgaatccgcgctgagagttgtgatcgttcagtctcaacttcttcaagctggcgagccttctcctcaaggtcctttcgtgaacttgtcatacgctcctcggcctggctcatgatttttcgttcaatctcagcctcggcattcatacgggcagtttcggcgtcggtgaacctctcgcggagcttgatcaattcgctttgcagttctttcttagttgtttccgctgtaactcgtgcctccgtagcgcgacgcaagctatcttgctggatgtacatctctttctcgatggtaatcttagagtcgttgagggtctcatatttctgagtcaacagtgcaagattgtgctcggaaagcatttgcacgtcatctcgtgactggcgttctcggctaaggtcggcttgagcctggaagagatggtgcttgagatcatttatttgttcctctagcagcttcctactctgtccagcctcggcatcctccgatctcttattctcaagcaaattcttgaggtccgcagcttcgcgttgaagttgcctctgttcggagcgcatggcatctctctccgcttgtacctcacgaagtttagattgcatgttgtcgtggcgtgccgcaagggaaattttttcggactcaatgcttctcttttcttcctcgtggatctgaacgtcgtttcgaagaactgcgatctcgctctcctttcgacgaagtagttcttcgtagctagtggaagtactcgagagttcggcaatctgatcacgaattgacctgttctcttcggtgacatcgcggatttgtttcttggatttatcgagttccttagaagtatttgcgagtttaatatcaagatcttgatcggtcttcaacaatttggcttccaggtcttgaagcttacgatctttcaagctgaggtggctttggagtatcttgatctcttggcccaattcttgaatttggaggtcttttccagagaactgagcctccgtttcagaaagcttgatatcgagttccttgactcgagaatgcagactgttcttttctgactcgagttgctggatgatcaaaccggcctgttccagctgggtaatccgaagttgcagctcgtcgtcaattttcctcttcgcaaagaccaattcatccagttgctcttcaaggccttcctggtctgcgattgcaccggaaagcttatcagcgagctccacttctcggtattgcagtcgcttgaaaatctcctccttgtccaatgcaagtgctcgctcactttccaaagtatgctgtatcttctgaatctcgatctcagtccggcgtctttcttcgtccagtttgttgcgttcggcaagatcctgtttcatcttgatttcgagttgctggatcttgtcgtcacgcttcttgacttccttcgcatttctcgtgtcccccagtagcggcttcatccttgaaaacatgcgccaccaagggctccccttcaaatctaggtaagcgtggaagttctgttgaataatcctggttgcctccgcgcggtagaggcgcttgttcgaaatgcggcgctggacaaatcctcgtgccagagattgaaacttagacatgatagttcggatgagttggtcacgtttctcttctaagtcggccagaacacctgctctgaagaaaactttggtgcggccaaccctgtaccagccccgatccataccaagctttgccaacatagtgcgagcaatagtctgtccctccaagtaccccttcggcatatcctggcaaagaacctcataacgctgtcggaactctgtgaacggcaagcggttcgggaatccagtacgagcgatcctgatcccttccaggacaccgttgcatcggagctgatccaagaccaatggagcgtgcagcatcttcggacgcttcttatgattaggtaggatacaacggacgaaatgagggtgggtcaggtggagctgagccatcaagctagatagctgctccttgtgtctttgggcaaccgtgcggaacaagcccttcttgacacgactcctgggatggttgccaccatcctcctctgagtctgcacagtcagagaacagatttgctacgtgtggtgctttcgaggcggccaacaggcgtgtaatattgtcgttgagcggatctttgttcttctcaagccaatcactcgtgttgtactcaacttccgcggcgtaatgcgtgagaatgaagccctggttgagacgagaggcgtggtactttggagtcttgcggtcccaaaggctatggagcttttcggtgaatgatttgtccgtagctttgggcatcacacaatcttcatcaagacaagagaaaatgccaatggggttggtcaattcgataaggtcgattgttggctgcaggtcctttccgaagtcgatgaattgccactcaatctgctccctcgcatattcttcttgctcaagaacaaacatatggtggttaaagaattgctgaagtttctcatttgtgtagttgatgcagagttgctcgaaactgttgttgtcgaaaatctcaaatccagcaatatcaaggaccccaatgaaatagttatcgtcgctagccattgagcgaccaagctggccattgattctagcgacaagatttccaaatccgcgctcatagattccctttgagagggcatccagggccatccggacctggtctggtgtctggaccttctccacccattcccggccggccttcacgcgtggatgcagaagacccttgacaaaagcttcggcctcaataccaagaaggtagcaagccttttccatgctggagtatccctcaggcgccagagttgcctggtctgctcgcatactcgccttcgcaacactcacatttcccagatgcagaacagcagcgatagtccgcaggatacagagctgatcctcgtcatcgaagttcatcacatggaaagcttcaatcaacgagttccattcttcctggtcagagacacctacgatagagtcatttccgtctctcgtataggcgaaatcctcgatctgaaggtccgctaggagaagcttctcgcgtgtttcacggtcagcgccctggagaagctgatagaaaacgtgatagtttctctcgttggggttaggcttgacgactcttgatttctcgagcagataccaatcgatcaaagctccagagatttggcctgcgcgagagaattcaatgcgaataaattttccgaaccgggaggagttgtgatttcggaccgtttgggcgttaccaaaggcttcgagaatagggttggctcgtagaatctgttgcgaaaggccggtgagttgcttcgctccggaacgaccataaggcgtatcagaagtggcgacagcagcgaggtactggatgaccttcttcgtattttcggtttttcctgctccagactctcctgttacaaggatgctttgattctgtccctcctcgacaagattccggaaagcctcatctgccatggcaaaaatatgaggtctggtctcctctctcccgcggcccttgtacattttgatgtactcattggtgtagattggtagtggacagtacgggttgattgtcactaggaagagtccagaatatgtctatacagtcaaaaagtcagttaaaatcacggatttgtgcattttcctgggcgtgacgaacatatattaggtctgactgatatctggtatgcaggttatgcaccacagacgcctcgttcagatgtgtgagttctgccatatcatctgccttgtcaaacttggcaggattgactttgtcgacctggtccgcgtctagttcttgttgctattctagtgtcagcgcattttatccttctcatgggatcacatccatacatcaccatcgtcggtctgcaccaacagtcgccctccttcaaattcttccagaaccagaccccggacaaaagccttttgagggtctcgtatccacacatatttgttcccagaaaagtcattatctccttcgagtccacgaatttgatccgcgccccgtcgtagttcctcagatttaatgaaacttggcgcaaatgttccggaggaaggactattctttgcggaattcgatcgctcgcgatttccacttagggataatgatggcgacaactgtgagacggacgtgttgcgcagatgacctctcgctgactccagcgcattcgatggtgtaatgatggccgatttaggccttgtatgtggggaatgtgttccttgtgaagacgatggccgtgcaaatagactggcacgctttggcgagccgttcagctgggagggaagcatggtgatcgtagttcaatgggacattatttgagcgtagggatcgttatcatagccaagattatttccacaatcacggtcgtaagtgtagtggaagtgagagtaggagggcactcgagagaggaggtgtcaaatagaatacaattaagagaggtgtgaagttggcaaaaagttggaagaaaagtaagatgttcgaagtgacgcacccgaatgtccatgctgtttgtttactctgcgttcctcgggcgcccgccgatctaaggtggcccgtgcgcgcgtcacgtgagatactcgatcatttttgtcgatgaaggcgcttagaccttaaaagacgaccgcgtatctcaattcttctcgagttcaacacctttattcatcattctctcgtcctataagcagaatccacagtcgtatggctctttcttgtttctaaatcgccatcagatcattatcacccctccacagtgactccaaattgaagttctgcgtatccttttcccaaagacctaccggtacctctccacctgtttaattcttcaagacaacatgagatttggtctttgaaattgcaacctttcttgaactccagcctctcgcttttgagaatcgtagagaatatatctctttcatccctgcacacaacatcatgtccgagcaacctccctcatacggtggccattcaagctatgcacagcaatggcctcctgcatacccttcgatgattcccgcgaactttcccagttcagagtatcctcaaatgcatcagccaacggcgacgaatcatgggccgaccttcgactataacatggcaagcgtcaatgcgaattcgcgagttccaggttcaaatggtgctggaaacttagcattcattccgcctcagttccccttcttcaaccacttcgatgcatcacaatttccacctcatttccctccaatgccgtttcctccgatgagctatccccctatgccaacagggtcctcacatccccccatgccgtatcatggtatagacggaaatgtcacacaccaactatcaacgccagctgtacatccgaaaaccgcccaggttcagccagataatcaccgcgaagaaggcgaagttagtgagggatctgatgaaaggtcactacaccctacgacacgcaaggctacgcgccagtattcggacctagaagaaggagaaactatatcttctagcgcgcagtccgttagaagtagtcagtcacgtattactcccatgattccccgtgttcagttatgttttactaataatggtgcagcatacgaccctcctttgtcagtctcagcagacccaagcttagttcaccgtgcgatgcagcctcagcggcaagacccacccgccactgtcccagcccctccacctcagaaatcggccgcgcagctacgaattcaggcccaaggcgctttgcttagcctggcgccacataatatccggtataatgaactggtcgctgagggcatcaaccctatgatcttgaaacgcctttacgaggaagtcggcatcaaggtcaccacatcatctgggcagtctccaccagttcctgagaaggcctccgccgtggctgcagttgccagcaaaggactgggaactaggaaaccagctgaggtgcccttgccagcgccccaaccttctgcccctcccgttgcccctcctgccaaagctggcaaacctctggagcgaaaggaacttatcgcccgcatgctagctgagaaagctgcgaaggtgacctccaaagaggcttcaccaaccggcagtgcaaagtcccaccctgcgatacaagttgatgaaccccgcccggttccaaaggaaacacttgtaaaggagaagagcaaagcccagacggagttggcaaggcagcgaattgaagaactcaaaaaacagactttactaaagacccagaaattggctcaggcaaatctgccgccgatccagttagaatctccagcgccagctatccaacacccgctccctcttcgacctcctgttcctgaatcccgtcgctctgctgggcttccaggactccttatgactggattggagcaggagccacatgaaactcttgccgctgagccggtccaacccataaacattgactcaacaccggtgtctcaagcaacccaacgcaagcgacctctagcttccgatttcgatgagccagttgcgcctacgaagaagcatttcaaccacgctgcgaataggttcgaccctactgataagctcatcattgcaattagcgacgatgaatcgctctacggtgatgatgaggacgatgacatggagttggattcgagctcagaacaggaacaagccccgatagtgacctcggctttggtcaagcctactatccaattaaatcctcctgtcacccgggcttcgacggctacaccacaagccccttctagtctaagtgaccaaggagacattcgacttaaagatatggaaattcaagctatgcgccgcaagattgcggagctggagctacgaaggaaatcgaagctcgctgccagtagagcccagtcacctcgcaccctagatgactctggggcatcatcatccagtggacaatccagtgggcaatcaagtggggtcgctgcttcttctgaagaaggtaaagttctttctatctcttttctctctctctctctctctctctctctctctctctctctctctctctcttgctatgacatgttcattctcaagtgctttcgagataaaactttgcgtttcaactaaccattattcagattcttcaaagacgaaaccgacaacggccgcacctgatatgattatgcccgttgcgccccttgcccaactggatgcactatccgaggccgctgccaaccgagaaccgctggaagaagcctttgctgaagaagtggcaaatggtgtaatcgatagcgccgcacagacatcggcttcattcgagtccgattctgctaggtcagctatgcaagaatctgatgatagcagcagtgatatttccgattcgtccagcgagagtgaggacgaacctactacctcgccagcgcaactcgatgtcgaccctgctactgtgccgtcattctcagagcctatggagattgactcttcagagcgatctgtatctcagagctctccctctgctatcacccaccctagtgccaattctgccgacgaacacgtttcccaaaatcagcttagcgaacaatctcagcgtgaactgtctgcggattccgacggttatgagcccccagagcctgatgctgacgcacagtctgagggctccagttacagccctcctccattcagtccagctatttccggtctcgtagaaaacacaggagtttcggcaccatcatttgacttggctcaagctgatgaaaaactaacaagcacacctcaggtgtcagactcattacgtcggtcggatttgcaggttggcgcttctggcgtatgaacactacccttctaaaaaaagtttttggtgaccccatactgacccctatctagactgaaacatcgtccgccatttcggagcaaagattcacgccgtacactagcccactgcgaaccttcaaggcttatcgataccacccgcattatgccgccgacgttccgagtggctaccgctcgctaacttacagtcataatatcgattccatgaaatacatgtgtccatatgagttggccgggggtgtctgcaatgaccgatcctgcgagtttcagcatcttcgggacatgactctaagcggtgcgtcgacatgaacaacgtgcaacaccccacctcgtcctcgagctcccccaccggcgtattgcactatctagtctgtttttactttctgtttattgctctactgccttcgtctctatctctgcctctacttccttcccactcattgccgtgtcctttttgccctgttcgaatgctgaccacagccgttaacctcgacagacgacaagattctcgtccagatgggctctgtccgagagggtcaaaccgaagaagaaaaagaaaaatatctcgctggtctgaaagagatcatcaacgacttacggcgtgacaaggtgaaagatttcaacactgtggcctccgagatagccgcataccgtaggcgcttcctccaagacccgtcgcgtgtcttgtccctgtaacattctcccaccctcattcattggaccctttcagtgtcctcttcaggtgagctgtcttctaccagtcttgtgaacaccaccatcgaagttctttcgatggtgggggaaaaacatcatcacaccacatggactcggacaatcctcatcatggccatgacgccatctacactattccatgccaccgcctctttttaggggtctcgcgttcatgacctggcttttcctctgcatcattagccgattcggcgttttcttccctgcattccaatgcatttgatctacgcgtttgggggctcgcggtctttggggtcacctttctttttccctttttttttttgttgaatctaggctcttgcctgcccattggacccgacaaaaacggtgttagggcatctgcatctcagctgctggtcgtaactttggcagtttcggcagtctctgctctgaggcaactctggctactgctaatctgccaccgaagggtgcggttgtaccattagaatctcggcagcttttcgcggaacatattcatagcaatcagtcaatatgtatttttttctatccaaccattgttctttttgtatcttcggtagtaatgaagtaagcatgacctcgcaactggcatagattgcgtatgagtaaaaacacgctaaaaccattaattcattcgattagaacatatcgtgaagtaaaatagaataaacccttcagctcagggaactccacaacccaaatatactgcagatgcatattttcagccgtgctcaactgagctgagaagagcaacaagaaaaaaaggtcaaatccaaaagccaaatccggaggaaatacccatttcccatacaaagtgagaaaaataagaacaagaaacaaaatgtgggttcctgcggctggtggatgctaagtatagcacgcagagtccggtcggggagatggggccagggctggtgtgacagtttcaagatttagatattcggagataataatagtaatagtcatagtgtacggagtcatagagtatggtatacggggtgatatttttaatattatctctcttctaatcaagaatgtaaccatgacatcctgtccctattccagaaacagatctatacgagttgactcaggacaaggcagatctagcggactaaatgtcttggattcgacagattcttgctgattggtccggggattcctcgttttcggttatgttcctcttcttgtatggacgtacggagtacatcgtaggttcatggccagcccgagatagatcacgcaccctgcgcccgagagtgaagtcagtgaccgggcgagcattgaaaacctaaggaaaatgccaagcgaaatgctagtaagcgggatgagttgtggatatggcagtaatctgcatctttaaggatttactgggatgacaagcgcgtccatagaaacctggaagggaacccaaacccgcggggcgcacagtccagcacagcctcaacgtcgagaagggaaagtaagtgcccaggtgggggctacgacaatgactaagttgggagctggatacggggagagtgggaataacatcatagagcatgccatagggggctgagtctgtgtcagagtagagacataagccctaaataataggtgaggactaaaagggtaacaaagatgcaaaggccaaagaagcggagaacaacggggaatagacttcgtttgtgttagcctccgagaaccaagaccgcttctctctgtatgagccatagggctgtttgctgcagatgccaggctcaaggagcggtaacaagaaaagaaaagaagctagttcatcctgacatgcatacaaagtacatcacttagcatatcggggtccattttcggctgagccgcaaatcatttcaaccaaccatgacaactggataattcgaggccgtgcttagaacagggggttgctgcacgccgtgaagatcacgatgactctacaccttggcatctaaggagaaaagaaatgtagtgatgatattgatgctgtatcaaaatgagatgagagtgaaaatcaaaatcaaaatcaaaatgaaaatggacaaggcagaacagcggagaatccagccccgctagcctcacgctaacccaaatcaggaacccgcaagtatacaaaattctagtctaacaaaacaaaaaaaaagagaagcatttacaccaggatatatgcccatgacccatgacccatgacccgctttgcacgctttgcataaaagcattccagaaagaaaaaaagaaaatcatccaaaaaaagcaacagagttcggaatcactatgccgagccgtcagcttcaggaatcaccgaaacgctgagtgagcatcggagtcacttaccattgtactcgtagtacccagtctcggcccgcaagatggcgtttcaaaaagtctcacttgatgcgcttgcactcgctgcaggcaatgtggctgcattgaacacactggggctgatggttgtagactttaggcccgtctccgcatccacagcagatgtacatgtaggtggcactgttgtacctcgtccctggtagtggtgttgttgagaggtctgtgtagtcggcacgccgtagaggccgtagaccagggaggtctggtacgactatgggcatggctgtggtcttcaatgttggtgtgcgaggagagtgcacggtaacagcagttgggtatgcagagactggattgcagtcgtgggagtgcgagtggacgctcatattgttggagaccttgtcacagatgcagcgagagcaacggggctttccacactcgatgcaggccatgtagagggcggaatcgtgaggaccaaacttgcagtcgcagcagtaccacaaaaaccccattgatgttatgggctggatgaatatggattgtattggtggccgagacagaatggaagactgggtggaaagcagagtgtccgattctttatagttgtagagcgggaaccgtgtctgaactgatacttggatgctaattgagtttgaaatggaattggatttcaagcctggggatcgtgaaagctatatacctcaagaatattagaatagatgtaacagaaccagaagcgcaaggcagcgttcctagaacagtcaacagcccaggctgccttgccagatccacatcgggttaagctaaattcattacccgggcagtaattggggcaatggatcaaagttgaccttagttgtacatcatccggcgagatgggttgcccaagagagtgtggcttagtgtaatccggggctgtcattgcccaggacaccacagttgcgcctagaatgtgaggaatctatgaatcatatctgaagaacaggtcttttgagtcaacgggcccactattccaggctaagcaaatgcccacaccgtctccaatggcctggcttaccccgagaatgtataggcgtcaacgggttctggtccctcgggtgcgccgaactaacggtctaccatcaggtcggatctcttttgggattgatgccttggtatgtaaatgatgttgatcaattggtttccaaggtgtgatatactccactccctcctagttttccaggcaccggctgcttcgaaaagcaaaacgaagagtcatcgagtcaggtgttgtcgcgcccttcgcagtgttgcctacgcaggctttctgacagcctctgaatatgaagaaaaatcagtttcatcattgtcgtttagggtattttttttcttacgattaacagattacgagatgctgtgaaacccgaaggctgatttctaatctaaattctcaccccgtgggcccgtagaaattccatgccgtgtgccttcctagatactatatcgagtcatatcgagtacaaccgtagcaccgtcgagatctaaaaagagattagagcatgaggtgatctgacattgctcaccaggccctatctgacggtcgcagctgagatctacagaattagcaatagtaggcccgacatttcccgtatcaacacggtagctgaggtcgttggtgaaaaggcaatatggggatgtttcaaggttctcccgatgccccgatccatgggacccccgaacgggcaacgaaccttgggaccccagggacacggacacccgggcgcctgggctccgattacgtcaggtttgcactgtttgcttcaacgacttccctgactcgatccgtccttgcaatccaccgaggtcatttagacatttattaaattcatgcatttcatattgctgtattgactccgtatttatggcgtctcccgcgcagaagcgcgtcaacgtcgtggtatccaggctcattccgcctgtgttactcggcgctgtcatatacgcttcttatgcggtcacgaaaccgttatccagtgagttttttgcgaattcggtcgcttttttaccaggaaactaacaatatgaaccccagtcgactatctaatccatcccttaccctcctataaccgaggcccacgagtcggcgctggcgccgcgatcatcgcgatctattacgtccttttaattcccatggtcgtttcttatatgcgactctattatcaagtcctgtggaatcccggataccttcccctcggtgaacaaaaattggccgatgacgaaagcataaagcaatcgaagcgccgtgggaagaaaggcacacgcaaagccgatccggagaagacaaaccaggcagacatggatgtggaaaggggctcaaactccactgctgtaggcaccgccgtgcagtcagatattgggttggagagcttctacactaaagatgtcttcgtctgccaggaggatggccggcccctatggtgcactacgtgctgtcagtacaagacagaccgggcgcaccactgccgcgaattaggtcgctgtgtgcgcaaaatggatcacttttgtccttggtatgatactccctgtgcacataccgcaaatcagtatccagctgacagaatgcagggttggaggtgtggtgtcggagacatccctcaaattcttcattcaattcgttgcttatactagcatattttgtacctttgttcttattgtgtccgcttattttacagcggagatccgacgccaggtaagacttccacgagccatatcaattctccgcttgttactgactttcgaccagaccggaggagcaaaccctcattggtgtgtctgtattggactgtaagtgcccacccacttgatactaggaattgagcaagtctgataaaaaccaggagcggccttttcgccttcttcaccgccggtatgacattgagctcagttcaaatgggcgtcgccaacatcacaacaatcgaaaacctaaatcggggcagcgtcgtctggaccctcgccatccgtgtcccagaatacctcctcgaacgactctgggcagccgagtccccctgggctccgacattccgcatggtctcctacccactacaaacatcatcgtctccaacccagctgcaaaccacaatcccctctccggacgaagacgtggttccgggcgaacgccacgtcttcgccatcctccatactttgccgggccagaatcccttcgacctaggcagttcattgaaaaatctccagcagatcatgggatacaatatcgtcgattggctgctgccgatcaagcagagtccgtgtgctgaccatagtagcatggagagttattttgccctgggtcccgtggtgacccgcttgcggcttgaggctggactaaccccgcccgaaaccggggctgttccgcaatccccacacccaggacgtaaccaccggcaacaatctcctagtgatcaatagttcggggcgcttagggtgcttcgtgcgtgttttggatactttataattaatgcaatgtatctccattaatgatgcactattggccggcctggctgtgttaggatgatttatattccgatagggtgatgccccctgccgggcaactgtatggctaaatgtcgtcgctatcacgtacaggcctcccaaggtcatagacatcttgatattagaaaggtgagccatgagatggcagacaaaccaaggttttccgcgaaaataacacgtttggagcgtttaactcggtgatctttactcaatataagtaaacaaatcctgacttataactattcataatcgatcatttagcgatcactaatattggaatgagagaacatatgaagtctgcatgtatgatatggcagctttatgtgtggtaaatgggatatatatatttggttattccagggtatcctccgattccagacaaataactaagtctctatatcctgcatcactcattagtattcgtatgtcccgtttggacagacagattgttgacatcagcgacacaatgttcaaacattatccaggatcagcacgagacaatcgtttacagtatatcgcctaacaccctaatatgccacaatgtcccgcgacaataaacaaacagaaacagaaaacataaaatgaaaaggcaagaaacgcacaaaaagagaggaagaaagagacgaaataaacgcaaacacaaccctaaaaccgcaaatctctatctcccacataatctatctccctagggaacaacctctgtgccacagaagtcgcattcaacatgggagcaaataggacatttcctctctggcgccaggttgggattgactaaattctggcacttgcagcacgtccaccattccggcaccagtctttgggcgcttgtcgacaggcattcgggtgtgggagtaagaacggatatggcatccgggaacggagccagagttgagtgtgcgtgagatgtcagcgtactgctcatggaatcggcataagaggaattgttaggccgggtgaagtgccatccgtgcgaaaaaggagttgaattctgtccttcactgttggtcccggtattcgaggatttgttggacatagcgttggacatggcgtgggcagatatagtggctttagtgtggaatagaagaattgattggcaaaggagatagtttgatctatgggggtttgatttgcgaggttctgaagcttttgaacgagttgattgaataagttgattgaaggagtgaaactgtagatttaggtatatcaagccaattgagtctgattgtatgagaagcagccatggaagactcactcttataatgcaaatggcacacacagacaccatgatcagggctctcattacagcacccaaggcccaggtatagaagctcacgcgaaacccgaggtgaacagaccagagtcaaacagccaaagagccacaactacagagtcgaaaccccagcatagggaacagaatacccagcgggcaaagaggcacagcaaacagcagccggcagtgtttaagcagcagtgaagcgaaagcgggaccagccagagcgagagaaacagcatggctccacgcccatatatttgatgtggaaggataacacgcttacaacctcatcatgacccgaacctctctagactacagtgtgtacctagtcataagttacatagtagttggctaactaagttagtcagtaaacatatgactaaaccatgtagatctctggtattcccggatcccgacgcaaaatatcacgccccggtgcccgggttgtgggttgctaggcgcaatgctggctgggcactacccgggtcgcgggtggatatgtagatatagggcttctattactcgatggccgggtggagtctatactataaaagctgggttattagaccttgaatggtagtacatagcccaaattggatcgtgtgggtttcttatgcggagtctgcgcctcggttggggcttctggttctcgttcctgcggtgtacgagggtgaatcggaatgggggattcgccctgctcagtgggctcggttcgcctgttcgcccttttcaatagcccttattcgttgctttgattattgtggatgacatatcccaaatatgtgcctttgtcaagatagtgcaatggatgtcatgtccagacaaagccctggatgtttaagcaagtcaaggccattttcgagttgcctaaaccgatcgatattagggtggttccatctatgacctcattcccatggagccaattcggccaattcggccaattgcacagcctctatactgtagattaattaagttgggagcaaatgttaggtataaaaaaagcataatccaggggatttatatccacgtttccccctcgagatttcaaaatacataactcacaactttccctttgcggctcaagtgagatcacaaagcacctgtggaccccatttctaaaacccacacatgtctcagattttgcccgaaacagaaatgaaagagagcattctttccgcctgtcggggttgtgttttgcatatgaagcaagggagtttcatagttaaagagcgggaacaacacatggcatccatggcatccatggttgacagcttcgagttcccaaggttcacgcctctagatccatggaatcagatttatatacatattcttatattattcttattttacatttgccttctctttcatctccagagtccacctgggcaacttccttcctcgcccactcagcccgggaaagccttggcgttattagtattactaaccttttgttcaacctgtggatccccaacccacttttgcgtcattgttcacacctttcgctttaacacacttctgaatcccctctttgattgttcagttgggcaactattgggctccaagcttcgtgtcaagttcggccccgactttctcgactttgtatcgaatcttcgcctccgagccaaccagttgggcatttctacatagcccgactcagattgtttaattactcagaatctcccgaagccgaccagagaacagaccgtcacacctgatttcaaccggccaagcattatcatctgcacccattgaatctacagttgcatatcgaaatgtcgagtcgctaccggaatctatctcccagccgagaccgacactccctgattgaacccatgagagcgtcaaccggaatggtagaactaaactccttctacgacccttatgatgcacccaggcgctccgactacgactacccgtccgatactggatactccagtgctttggggtaccggtcagggcgaccatcgaaactcgaagcttaccaaatatcctcccatcgagttcttgacccgagtgcgtccaccaaaaaacgtaccgaatacagcatccaaccccgcaataggcacagaagcaatacagcaacgacagcggactaccatacaccagttcgtctggccgtaccttccgcatctgttcaacatatctcgccggtgcgccactcaattcagcgccgtagcccgagtcctctggctacagattccggccatcacatagtctcggcttcccctcggaaccccgcacatcgccggatctatagcaccgactatgcgagcgacacgggctatatggatctacggaatgatcccagacctaggactgatcatagtggtcatcaacaccgtgtccatccgcctcgtgcagtacgccagccagcgtacgatgggctaaggaaaggtgatgacatcgatgactttgatgcctattcatacaccaacgctcgtgagcaattcgaccgggactacccggtcaagccccgtcatcgcgggccgagatactcgcccgatcggccgctcagttacactggcgtggaagaaagccctcaggggaaatcgcggaaagaccgtcaccgtggcccacccccgacatcctggggccttgacaagctcgggcgtgaacggccgcgaagctcaacacacggcaaggataatcgggacccgcacagatcgaaggatggatttcatgatcaagccctggtcgccgtacctcaagactctgatagcgaatacccttctcgtcacgaggagcggcgccgtcgtgtccacagagcacgccacgtgaacgatcgggagcaccactatccagaagaccaccatctcaagccacatgatgtcggcacggtcgctaatgtaggacttgggacagcggccttaggaggcgcatactccgacttgtcggactacgaaccgcatcgttcgtcgcggcggaagcacagacgctcgcacggtggccatgatgccgtccagcccccatcgcgggagctggtagcagcagttccagccgatgaaagaaccaagcaagcctacctggaccctgccgatgcccatcgccacggtcgatcgcggcgatcctccagccggcgggcgcacagcaatgacgccgggacatcggacgaagacctgcaaaactacaggcgtgagcccgcacgtcgcacgcacagcagcaccgacactgaaagcgaccgggaccgctcgcgccatagagaccgagaccactcccgcgggcaccgctctcgctcccgccgcacgttggagaatggcaacgagcacatggccaaagatgaccccagaagacttattgctgttgatccacctgctccaaaggagccagagggtcctcccaaaggaattctcaagcctccgcgcccggcattcccagaggaacccaatccggtgagggagggggtcgctcccctcaaagatgctcacaagcaggggatcccgccaggagctcgctggacgaagatcgaccgacggctcgtgaatcccgaggcattacaaatgggcaatgagcggttcgaggagcggtcggattatgtgattgtgttgagggttttgagcaaggaggagatccagctgtatgctgtgaagacacaggagatcagaggtaagttacgctgctgtgtatatcctgaaatcacatttgaagtagaatactcaccattattgcatagatacccgacacaaggaacagctgcgcgagagacgcaagtccagagatgagcatcaacgccacggccgccgaggcgacgagtcctccagcgacgacgaggacgagggcgaggaagagccctggaagcagctcgaagcagcccctgcaccatccgcacagaatatgtccttgccgtcgcgcccacgcgcgtcgaccaactcaatgcaggaggctgaaaggcctcgggtgaacaattcgtctgctgcaccggcataggaaaatctttcgatagctcgggatttgcatatccttcgcaaggcctgggactagaacctagtccgttgagaccaaaatggcgttcgcgaagtgtacaggggcgaggaattcgtttgttttcatgttggctttaacaaatgcacctatccttctgggacgaagaccatgcgacaagcccctgcaggcaaaagcaagtacccgtccaatttacgcgccacccactgtactccgtacaaacgcatctcagactcgagtcgtctctttcctcttccaggttatttcaacttacaccgcctccacaaccatcaatgactgcattgtatgcactccgtacgcacctgtcatattggttgacaggacgcccaagatcaacaacgcctgcgtatgcagcccaacacgccgctgggttctctccgatccaatcaggcccccatcttccattccggaacccaacgatgatcaatcgctaggcaccgacgcccgcatctatagtcatctattggactgaatacaacgaacaatagtctggcgtcgagtcgtgcggctcggacggatcgccgtgtccttcccttttctttcgtcttctgtgtcactcacatattcctggatcagtccatacagtggggtctgcagatgtagtcatatcattacattatctcgaggaagagaagataactagtatagttgaagctaggcttctctacttctgaatatttacttctttcgttggttggtatgtgcagagagcacaagagcgctaaggaaatacaagccaagcgccctttctcaaagcgcaggagggggaaatgtcaagcaaaaagcaaataagagccacacctgcgaatgcaattgtgtgaagatgcaatgttttctttttttccttttttttctttttttctttctctttcattttctacatttgaagtagtgtctgtctaccattccaccagggatcatccaacagcgtctaaatccaaacccttcctattgcatgtctgatcgtcgaaaaagaaaacaaactactagtcccagtgaggaaacagacagaaaagcagaagtaaaatggggaggcatttactccctagattatcgtagttgcataggggctgcaggttctaggcatacgccactagcaaagatttaggctcttgtcggatttcaccgacgctcttctggtgatagcggggatatcgattggttattaacattataatgaagcataaaatcgcacatctaactacagacttcttaacgggttcatactgtgcgggagtatccggagtaaagcaaatacttccaagttcatactgtaccttgtacatatttagtcaagattatatgttgtaaacaatattaaatgaattacccctcccatgtttgttcgaggtcgtcccacctacttccccttgctgtagttgcaatttgcccagtgaatagtaatagaacagtaagagcagaatatagggatggacgtatggagtactccgtactaagggttacaatccttagtactacaggtatgtacgcattgcatcctagcatcgatgactgtattagtgttggttaagtactcatagccttttcattccgtatagcgtacacgagcgcctgcccaaacggttatagcaaagttaatggatattggatcacgtcggagacattctcatcacatcggtgtcaaagtcgccgagattatgggtggtatacaaagtatatgtctgtagtatgcgtcatttagtatgcctcatgtaaacaacaactaaaggccaaggctaaagctaagaagcattgtacatagtatgtcgtatagcgtcattgctatgctgcatactggagtatacgattcacggtatacgatgtagtttccattgccgtgcaagcggtctgtggatgtaaaatcacatccgattcgaggaaccgagatctatcgaggtaaccaaccgcccgagcgttgactgaatggacgagccatctagcgcgagtcatgggtgtggcgaggggtgggggaaacgggatctcacttggatgaagcgaactctgggtaatagcgtatgatatatgatagctaagctaccgagtcttggtcgatctcgatatgaatcaaatcaaggaagatggagagctggtttggctcagagcttgactggcgggaaggatcttgttattacaatcaattgctttattgtccatatacagtgcttacctccgtcttgaagatgaaacctaaaggaacttgctgatccctaacacgatctcctaacgtcacgacgcgatttttaatttctaatcctatccttgtttttttttttttcgattactccgcaactccgtattccatatggagtatctccggactgagtatgatatcagtccaatcgttaactaactagttactttagtagaaattttttatattgcattgacgccttcgtcttcaacatagtacaaaaatcaagattggctgactaggtgtaagtgcaaccatcccgaactcgtccaagatcgtcgtggcacatgggggcaaaaaagtaaaaagcaaatataaacgcgctcacttgacccccctacctccgcctccgcctctcgacatcttgacacatctgaccttgacccccgattgtgtcattggattatcaatgcggccggggagaaggactgaattagttgcgatctactctggacccccggcagtgatccagtgcttatcaccaacggagtatacctgggcttattataggaggaaaagaacaaattcgttttcgggttactatcattgcctggggctctgacgttagatacgtgggatatctacgatcagcgattgaatgttgcattgcgtagacagttctgttcattcggtgtgatttccaggcataggaccggtgtgtgtatgtatggtaattatcatcgccatctctgcacagcctccgggatttccgtgtcttttcactgatagtaaaaaatttcaatttttggcattttcccacgcactcccagcctcaagatagcacagggagagatctgaaacaattcgctccggccacgcgacgggttaccgcgcccacatgcaggtttaacacatccctccacatgggatggctcacaaagatttagtttgcggtgagaactaacttttgggtattttggcttttgcttatggttcggctagaaactgtttcgaaagatatatgtgagagacggactgaaactgatatattaactatgaccacatattgcagtcggaaccggaattgtgaaatacggaatatggatgtatttaccacctttgcccgttgcatttccattggacgcaaatgatacaatcgctacaccaaatccgatcagggcccccgggttacgattccccgattgcccccagcggcttttggcggctggggccggagaacggagtaggccggtgtgataaccttcaacttatgccggacttgcctacacaaaagtcagagacgcgagacagctcggctaaaaataataataaatacctcatcccacgttctaagctctattcttcggatccggatggtggggccgttaaacgatccatcgactactgaggtagtatgtatgtcgcgtctacggtggatgcttgagataatagtgcgaagtacggagtacaggtacacaatatacaataatctacagtgggaacgaggtcgtagagagccaatgcaacatattcgagttgtgcattcttttggacttttggagggggggttatcatttcctcttctcggcgctcatcccgcttggtccgaagggggggccatatccgtcttagggcgatccgatccggagtgcggagaatgttttattctttttattcttttatttttattctcattgactataaggaaggaaaggaaaaaagatataagcattaattataggctgattcttcaagggtataaagacgttacaagccctggggcagatcattgcagattaagcagactaagcagggtggtcaatatgcgcatagatggaagaccggggtgtgccaactttaatttggcagttgaatcccggtcgaaaaaggagaaagcctttagcctgggcacctcggcatctggacatcgatggatccacgcagccaaacgtaaccatgggcgcccgccaagcggctaagactatcaagacttgaagctgactccctggctcgccgctccgtccagctcaacccgcgatctactagattgtggcttgtcgcccctcaattgccccatgtctattggtgtacccatgtttccatttccatgctcggccgagcgttgatattgagtaaccggacataccggtatcgaaatcttcccggtttccgatcaggacgtatctccccggaattcggaatggctggttcatacaggaaaatttcaaatttgagctagctggaggtaggtctggaggtgaagggagacagctcgtctgcattgctgtagctgcaagaagcaagggttacacctggccaacgtggacgtccggagtctgcttcttcaaacttggttttgcatgatcattctatcattcttgtcgatcaaaagaatcgagcaattaagtaaaagatcacggatgactcgtgccgtatttctatctccgggtttctagcccggcggatgaataaaaccttcgtacagaggaaatacctgctctatctatttccagcaggcccatgggtgtcggcgctagatggcgcgtttgaactatgatatgcacatactatccacagacagcagtagctcgagtcagtgtgctgcttagttcaagccccttgatgacaaagtgcctgcaaaccccgggcccagtttcctcttgctggatcgggtttagggcgtaggtctcccgcataagagatgacaatctcacatacaaacggtgttactctctcgccttcgcacaggccacctggggtctttgctttgtctatccgaacatgacgtactctcccatggatcggcaagcgatcgagaccgacggagaccggcgagaaacgaaattgaatccacactttagcgaggttcctacccgtctcgacaaatagggagcttcgccatttaaaagagctaacaatgctctggaccactcccagtcgatagtcgatccggggcggtagtggcacagtttagagcaaaaaggggccaggattgtcggttgatccgcccaggggtttgccctgtggttcgtccccgatagcgtccccggtcagccccagccacttggcgagtgacaccgtgtgtaacaggtagtgtcaggtggctggttaagctcgtctcatgtttggtttgaattgagatattgaggaataggagaaataaaaataaaagtagtagatctaaacagtacctcatgccatatccaagcctgcatagaccatgtgggtcagcacaatttccttgaagcttggagactccaaaattaccgtgtgggactgcgggtacggcttaacggaagaccgcgggatcatcgatcacagcccacgccaatagcaggccgctggtggaaatgggcaccgtttcttagccctaaaaaatgagaaaagaaaggggcgcaaccgtgcacaggattttagctccaaccttcagggctgagtccttgagttcctgagagattaggtgtgtctcgaacactcaatccccatacttcgatccattgagcaggatgctattggttctaaccctggtttttccgtgtctttattgtatagctgaatggaccacctacgggctatcccgattctggtagcactctcaaaggagtatagacaggtttgaattttcttttcttgccttttcttttggatttttattattgtgcattgcccagtaaacctccgaggttggatttctgtacgcccatcatttcaccttcatgcaaagtcactgcgcaacaatcgacacgatgctttcccctttctgttgatcaaatcaacgcacattgtagacttgcatacggagtactccgtactccgaaggtgagagcctcatgggccagttacccgccccttggtcatgggagaacacaaatgaaaagacaaactcaaatcctcgatatcaaacttaacatccattgttaccatggacggttaccgttattaactccgaggacgcccaataacctccgagaatcgtccttgagcactcgtgccgggaggtctccacccccgaggtattccgtacaaagaagggtacaaatgacaagggtagcagagtataaaaaataattaaacctaagagccaccttatagaaaacgggtgcctaggcattaatttagcgtttcggccatttcacatgaagcacaggggccaaaaaccaaaatgcttgaaaggatttgtatgttgtagtgacatgcatcggccggtgtcagagaccggagaaaattgggagaaggttaaggcttgcatctatcttttctttctttttttttcttttctccctctctgcgcttttgatttaatctttttcttgaaccacagctgattaaaaattgccaaggttgactaagatgccactagagaagtttcgggatagagcgaacccgggtgctggcccgcattgtgaatctcaactcgattggctattattacgacggaacgatggctcttctagcgttagcgtccaaaagagggactcgatcgtgcgtcgttctgggatgggtatatcagagggaggtttttttttataaatctctgtcaagcagcgtggccgactccgttcggagaactagttcgtgagatcgacagggttacactcccacgaactcagcccagagagagagaaaatactaaatgggcgccgttaggctgtttcgagtttatttggatggagagctgagttttctctttagacaattgggccgtggaaagaagcagctgagaggtcggtgtaacttactagtacgcgtctttaaaagaaggaaattgatttcctttttttattcattcatttactcttttcacgtattattccgccgatcttcgatatactccgacgagaatttctcagcccaagccgtacctgaaactggcctctgcacgatccgagagcaacgtcaactagctttcttttttagcctcgagtccatcctgaggtccacacttcaatctgcatgggtcaagtacatattctagactttgtggtgggtcgatgatattcgatttaacgtcagggcaaacggatgggtaacttgtatgttgaagtacttgtacaatgtgtacaacgtcgacagtcaaattggccttgtatatacggaataagttatagtagagaggaaggaaaaagctctcttccttctattattctagaggctacggagtatagagagtctataggatatctccctgacaatcaccatccacctgaatctcaggcctcaagagtgatcttatttacactttgcaacatataaaatcaattacataccccaatggacgtatcacgatcgctccatcggatccgagcagtccaagccgttgcaaatcccctggccctaactctgtatagattcactccccactggaaagcatgccgtagcacatcctttccccacttgcacgtctctttgtctgcacatcatccccaagcgtctatctctcgatttctctctttgatctcggctagcctgatgacacatttaatttccaagaggctcggatgtttaccggactcgaggcaacctcctgcatccatcctggtcattattacacctttcccgctagttaccagatcctgatacgctttgctcttggacgtcttcctttttttttctaaattggttttccttattgggcttttattctttttttgcatttctccattttcctctttctttccttttttttccttttttctttctttcttcgtttctttttctctctttttcccaaggcccttttattcgagctcgaggtttgtcttcgaaaggagtaagatgagaatggagatgggtgcagctagataaacgaccctggaccctccacttgccttcacattgacacggtcccctgaaccccagtcacctagtgtgtcgcgcagctttctgtttagcctcagttcgggatcgcccgcgtggttcttacatttttaatttttcttttccactttctcccaaaaggcaccccatcccagttctttcttctccatcttgtactcttttccaagtttgcaagattctgtcctgggccgtgagagaggtcgttcatgaccggcatggtacagcccgaccttggtcctccagcgacgaagtacaaggaagattcgattgatgatcccgtgagtatcatttctattggtatctttttcctttccagttcccgtctaccctatagatttttttgtgagatctttcctacttcaatatcattcctatctttcttggtcatttatatgtggttgccagctctatgtccagtggggttatctcttctctcgactatctctcttccgtcaacctggatcttgtgggagcaccatggtcaataccccaaccagacagccttcaactcaggatgccaaaactgatcgatttggggcctgttggccatgacctaaggagtttgtcccgtttatatctcttctggacccacgaaagccctgctctgactagagcctcactacgaagaaaatgtttcaattgagaggagcaacggaaaacaatgcccaaagtccgtgtatctgcatgatccagcttcgagtgctgtgtcccccggaagaaaaaagaaaaagaaactcccactcgtgatatcaaggacacaccaacgctacacagatccatgctattctttagttctggacggactatcccggctataccctggcgcaattgttacgcacctaaggctagccctgttcgaggatttccattgatctggggcccaacccaaccccccacctctatgatgagattctgcatacctgcaagattcaaattcccacgctagaccggaggggtcatatgctgatgtcactctggatacgtctggtcgtgtttacaagtttcctttctttctttcctacgtccatgttctcagcttgtagcaccgtgcattttttggctcgaatcttgcttgtcgtatctttctggcatcctttcggggctggctatcaaagttccagtcactgatgtgtatttctgctacagcttcgacacggcaactctgggcgttcgggttctcaacagcctcaatctcgatcaaatctagctcaaccacagaagcaaggccctgcctcgcctgttcagccctctcgctctcttccgcctaccacatatcctcccccaccccatcaattaggaaacgaagttctccatcataatcactacggaccgcctcctcaagagtcgccctactacaccacccattcttcctatacatcgaccccggcgtcggcacattacccttctagtggtaagccagttctttttagcagtgggaaatcgttgcgttgagaagtgacgcacctgtgcttggctttctgacgcccttggcccatttaattcttattaaagacatcaactaatctttaggattagggccacctgacctcatggcctctaccgctcaaatgcagagaccttatccctctatctaccacacccctcaatcaagctcaccagcctcggtagcttctcagtcacatgaacaacatggccgcaacatgtactcgtcaccccagatgccgccacagatgtttggctatcctccatactcgcccatgaacccagttcagcccccatacggggcccaccattctccccaacagcatcctacaacacagccattgatgatgcctcctcagaaagctccatcccaagggccaccacaccaatccccccacctccctacgtccggcatgtccagcagccccatcatgaaactcgatacctcccaccccagttcttcaaagcaatcgatgctgaaccctccccacacggcaaccagcagccaccacatgtctgctagtaatccccacgcaaccccatcactaggcggcagcacctccagcgcagcaccaggccccatcccagccactaccccactggtcgtgcgacaagacagcaacggcgtgcagtggatcgcctttgaatattcccgagaccgggtgaaaacggaatacaccatccgctgtgacgtggaatccgtcatcgtggacacgctcacgcaagaattcaaaaccgagaactgcgtgtacccgcgggcctgctgcagtaaagaccagtatcgcgggaaccgactggtctacgagacagaatgcaacgctgtcggctgggcgttggccgagttgaatcccgcgctgaggggaaagcgtggattgatccagcgtgctgtcgatagctggcgcaacagcaatcaggacccgagactgcgcagcagacgggttcgccgtatggctaagattaatcgaagacagtcggttcccgcccagtctcatatgccgcagcaaggcccggttggtccatctggtccgcctggtccgggcatgaatgctatgccggctcctgttccccgtccgaatttgggtcctatgtcgatgggcccgccgcagatgcatcatcatcatcaacctgatggtaatcctaatgaggaagttagcggtatgtttcaccacatgtgatgtactttgtgctttcggtgttttcctttcttttttaattttcaatagcggcggctcactcccgtattctcttctggggctttttttggaccgggtctatgtgtgtatgtgtatatggggagttttgtgtcttgtcaggtcccatctgtgtgtgtgaggattgtcaacggttgtatgagatgtgtactctctcttgtatccctgcctggtccgcctgtgttcttatatgttctattccataccctgttcaacttcactactttgtcaccttttatcatttgacaccgcgcttcttgtgctttggctcttcttttcttggaactgaacctcttccccgacatggttgtacagcgtaggctaattatcccaacacccataggcacagaatacccaggccaccgaagcatggacacacgcctcccacagccctcaattcccgacctccgccccgtccacatcttccacgacaccccaacaaccctaaccccaagcggcagctccagtggcccctctatgccccctctactgcgcgacaacaacctcacctcactaagccgccacaccatcgccaccgctgcccgcatcggctcaaccaaccacgacatcgacgagcaaggcccaaccaacgaagatctcttcagccacctcccagacggcaaacgccgcaaattcatcctagtcgatgacccgcagcgcggctgccgcgtccgcgtcaaggtcgtcctggacaaagtcaacatggacgagatcccagactcctaccgcgagtccaacgccgtctatccgcgcacctacttcccgatccagatgcgcgacgagaaccgtgtgatccccgccaagcgattctttcgcgatgacgccgagcaggcggatgaccccgaatcatcgactgtgggtcgcacgaccgtgcccgcgccgtcgctcgacgccgacgctgaaattgacgtgccgaagatctcccgcagaaaacaccacaaggagttgatgcttaatgacctcggctaccgtatgagctggagtcagagccgtgtgtttgcgggacggatcttattcttgcagcgatcgtgtgagtgtctacgtctatttgttttttttttttttttctagttttcgtcttttaattcccactgggggatttctattttcgacatccacacgtgcttgtgatcaatccatggatttgatctgacgacgactgagacatgtgagacatatgagacaccgctaaccgtttgcgaatagtggatgcctaccgtgataaaatgcgaagtagtatgatcgctgcgggccaggacgccacggatatcccggatcatttcgatactcgtcggggcaagcgacggttcctggagcgtgggtgtcgggagtcggagaattctgcacagcggagtgcggaggaggttgaagggtgacgagatgatttctaatattttcatttttcttctttttttattagttctgtgttttttctgcctttttttggtttgtttatatcgtttccggccgaggtatgcgacaagggcgttgacggtttgcggaaaaacagccaaattccaaaaacaggcaaaagggagatatgattgatatgatctggatatgcctcagatgataccacgactttgattcacgttgaatgagacatgtgtgtttatatagagaaatgagttgacagttgacagtgttgacactgacgttggccgaagataaaaatagcaacgcaagggactcacatccactgtaatccacatgggaccctggaagaccctggaaaagaaccctgcgatgatggaatgtatactctgtaaccacgttcacgtcaacggggagaatagaaagacgaatcatagcaatataataaaataagtattccatagccctggaattctcattcagcgtggtaaatcgaagctttccccgttgtcccggccaacgcctttatttatcccgacctttgtactctcgacttcgtctcttctctctacatttcttgtttattgtctttttggagagattcgaaatcccttggtgtgaattcggcggaattcagctgcattcagtctaaatttctgccttggcaccttccctgcatttttctccgttcgcgggattccttcaccctcagttctttattattcaaagtccggtccacccggacacttctccttccaaatgtcagactcagacaccccactacctccaacccatcgttataaccacgcctctcgtgagaaccaaaccatcacacccggcatggacaatctcggtcccagctcgccgggcggtggcatcagcggcatcgccctaggaatcgccaatacacacagtcgccaaagcggcatcgacgcatctcgcggcatagacgacggcttcactggccccgccgagcgcgagtatcacacaaccggctcagacacaccctacgtgccctcaccttatgccggcccggactcgtttcctgccgaacaccacgcattaaatatggcgagaggcggcgcgctggcctcgcccgctttgcagacgcccagtcagtcgtcggtgcagctgagcgatcccgcacacaacccgtacccataccccccgacttattcgggcatcactgatgggccctatcagcgacattcaaccgcgtacagcaatggtgagatgacgaatattaaccccgatgagatcgtcgatgatggcgatgaggactttgggcccccgcggagtcgagctgcgcctgctgctgcgggtgccgctggtggcgccgcgactggtggcattctgactggattgtttgggcgagagaagaatgttgatgttgcgtatgactcggttcctggtggtggggtggagagcggaggagcctcggggagatcacagagtaacggaatagacgggcgcaagaagatgggctggattgttggtcttgttcttgggtttgtgattctgggtgccatcatcggtggtgcggtgggcggtacaattggcagccatcatcacgcgaaccagtcgaaggttgctgccggtagttcagacactgctaccggtgatgtgaagaccaatggggaccttggcaaggattccgctgagatcaaggccttgatgaacaacaccaatctccacaaggtcttccctggaatggactacacaccgtggggcgtgcagtatccggactgtttgaaatggcctccgtcgcagaataatatcacccgtgacatggctgtcctgtcgcagttgactaatacagtgcgtctttacggtacggactgcaatcagactgaaatggttcttcatgccattgatcgcctcgagctgaaggatatcaaactttggctcggcgtctggattgactcgaacaccaccacgactcaacgccagatcacgcacctctacaagctcttggacgacaccaaagacacatccatctataagggtatcattgtcggcaacgaagccctcttccgtgccggctctagcaagcagtctgccgagacgaccttgatctcgtatatcagaaacgtcacaaaggaggtcaagaagcgcaacctggatctattgattgccacctccgaccttggtgataactggaatgctgagttagtggaggaggtggatgtcgtcatgtccaacgtccatcccttcttcgccggtgtcaacgtcgatgttgctgctgcgtggacatgggatttctggcagacccacgatgtggacttgaccaagggcacgaacaaaacgcaggtcatttcagaggtcggatggcccagtggcggcggcaaagactgcggtgatagctcggtctgcgacgacgacacgcctggttctgtcgccagcatcgagaacatgaacactttcatggccgactggatctgcccggcgctggaaaacggaactgattatttctggtatgtcttgctcactgtccattggtctattcaaattactaacactctacaggttcgaggcattcgacgaaccatggaaaatccagttcaacacgcccgggaaggaatgggaggataaatggggtctgatggactcggcacgcaagctcaagacaggtatcaagatcccagactgcgatggcaagacggcctcgtaacgtgctgtccgatccagccctggctctcttatggaatcatgatcacgaaatgttctcttatctgcataagtattgtgttcttagtctgaattgttttctgctcactggcgtttgtctttctctgataccattcatcacaagggaaccctcgaacatctcacctctcatcctcacacctttcctcgattttcaccttttccacttcgaatcaaaatctcggggttcccttcctggcggtccatcatccttccttcctgtctttttttcatctgcagtctttaccaattgctactcttcttcgagccatgcttgattctaccttgcatatcttctttggtgctgtccattcctttcattcccatttatgaggatggtcttcgacccatgttttcggtggaaatttgtcttcatgggatattcacaggggtcatttgcgcttgtgtttgcccgcctagctccatgtatatcatataccagctcccctcggcctccgtgtacatattaggtcaattcatcaatctcggtttacctggaattacctgtaaaaaatatcatatccacttgctttcttcattgatcattctcttcttttcctgcaaggaagccctcaggtattattgtacagaatataggaataagacaatagaagtggaacataaggtctataaatgaacaaagagggcagactgactattcagaataactaggatagaaagtgcctacctattggctagcacttctgcaaatgctgcgaacaacaaacccctcacttagctagcaaacaatttggtaaataagagaaagaataaacaaaagaacaaagaaagaaacatatatgtgctgaggatctgtagagtcaatgcagagcgtaacaaacaagacaataatagaagtagattcataagtaggaaggaacctcgagaaagaaaaagtcctcagaaagatcttcagataacagagagctatctcggtttaaaggttccaaaaattagaacggagatgagaacagaaatccttttgttaagctcctgacggacaatagagaactcggaaaagtacggtctgtatccgcagagatcagacggagggtttccgccgtaacatgcttcgtgcccttagaccaggaccgaagccccagcctcgtttcagccttagatgagccgcggcaaagttcctatcagagtcttcaggatttcccttcactggacaacagcagacgtatatttccgaatctgaagctgaagaaagttcaaaaaattgaaagggtactcaacaggaacacgatgtgcaatgtggactggagtggtgtggagaagaaagcaagaagaaaagagaggggggggggggtttatacctccccgggggcttgaggaaatttgggaattggggttggtgacgatttttgaccgaaagggaaggcacctgatcaggacggtacgtggaacgtgggtacttcgactagtgggaaggtgcaaacgggtaggaagatcatgatatttaactccagaaatacaccaacgccaatccaatgcataccaattctataacctcatgcatctttcatgaaccaaaatgcccaaaacactaatacacatatcattctgcaccaacgacctcctcgacccaatagagcctcgtattccaaaacgcatgctcaagtgcttcaaacaccggcaaacaatacgactcagccccatccacatagccttgtagtacaccaccagagtccgcatgctcgagcgggccaccgaacaacaaccacggcttcgacggcagcagcaattcaagatgtttgcgttctgcgccgggacagaagagcagtgtgtttgctgtgatatgcgagaaggcctctgggtgtttgatgacatttatgttcagggctgcgaggagggattcgtctaatgtgttgaagacagggtcttgtgcgtagacttttatatccgaggaggtggtgcctgtgctgtggttagcgtgggatactgtaaacgtaaatggagacagtcaaagcaaagaagaagaccagaagtggaccatccaaaggatcgggaaacggacaagcaacttgatccttaatactcgccagggcagcaagttgataaagcgacacggagcgccgatcaacccatccatcacgcaagaacccactcgggctcccaagcccaatacagacaacggcgtcaacagggcaacgggctgggatggaagaaggagcagtatcagcatcagatgaagaagaggctttttctcccgccctcctcagccgttcatccaaaacgcccgtcaacttagtccaactctccgaaccctcccagcgctcacgatgagttcgaaactgcgcctgcagctcatttagcgtgagtcgacccggtgcctctgcgggagtcaggacgggttcttcaggctggtcagaggagatcccagtcccggattctttgactgctgttgtgcctcgcgggcgtgtgcgcattacgcgccgcacgtttccgccgctcgcgacatgggtccagccgtcgtcgtcggtcacttgggttcgtttttgggttgggcgtttcggtcgggaagggtgggatgtatggggcatatttttatataagtatacttatataaataatgtggattttggacgaattgggatattgtatagggttggatttattgaagcttttttttggagatgcgggggaaatgcttggcaggactccaacaggcttagtaagtagactggccccgagaagttactccgtactgagggtgagatagaactacatattcgggtgaaatagtgaaatgctttgcaggaaaaagtccaacaatccagaacttaacctatgggcgcactcagccactctgtaagcgctcaagttgtttccccgaacgttagcgtccccctcggcgcttccaccgctggtcgctcagcaaatcatcatgcagtattcaccctttgagtgatggcacttgcagcggattgtgatgatcccaggctacccctgctcttcgtcactcctcgagccagtcatagatgcctcgccatgcagtctcggtcacatctgccttccagggttttgactcgtccgcccagtgaaggccagtcagtacccctcaaaaagaccacttagccctcgaaaatcatgttttggtcttggtcttggagtttctatgattttggtgtccatttactattaccgttgccctccctattatctgcttttattctgcgatcggagaaatcgagtctgagtctcggcgacagctgaataattcctcaactcgtgcaacttgtcaccgtcgctgtatctcaccatgaatttcacacaatccatctcgcgatgggcttccgtcctactcctgctgtgcttgggtctggcgcacgcccataccgtcattacttaccctggctatcgcggaaacaatctccacaccaacggcaccatcgagcaagctaacggtcttggtgttgcctacgatgcgaagaatggctcatacatctacccatacggcatggagtggatttatccatgtaagcaagacctatctacccgtctagatatcaatcactgactcgtttttcaaggcggtggtatgcccaggtcgaccaaccgaactaagtggcccgtcagcggcggtgctgtcgccttccagccgggctggttcccaggccatgccactgccctgatctacgtcaatctcggcttcggcgaaatcccggaaaatatgagccaccccgtcgtcccgcccttcctcatcgtcggcccgaccaacaatccttaccccgggactgtgtgtctgccacaggtgcctctgccggccaatatcaccgtcagcccgggtgactacgccacaatccagctggttgagacggccaagcacggcgcttctctattcaatgtatgttccagtcccctcgttccgacccggcaatcaatatactgactttctagtgcgtggacattgagttcgcagaagatggcgatgcgtctgtggagacggtcactcgcgacaattgcttcaattcgtccgatatcagcttcgagtacatgtacaccaccagttccattggttcgggtgcggcgatgctacatccgaaactgtcggctgcggctgtcgtcccgcttttgctggctgttgcctttggcgtctacatgtagatatgtcgggctttctttatcgcattttcgcgcgctccttgttttgtccttctttgcgccatacccctggttttcattggtctctgacgcttcgacatcggtgttgactacatgtccatgtctttctggaatggactatataattgatgttctgggtattctggcgttgactggtgtcttgactctttctttaattctactgaacgaatatacttgtccaatttgttgacgaatttgtggagtaggcacttattcattcaggtgacgcaatcccaattccaaggctgagttttgagatgacttgacctcaccatgccgacattgactcatatgatgtacctccccttgacgaaaactaacgttattgattcaccccatccaggcctatctttccttttgatttcaatctctcgagacattcaagatgtccacagccccatatttatacggagaaccactccaaaaggctttacctagaaaaatccggagatatcgcctcacttcaaaaacaccgaatattcctctggttgaacgtataccaaaactcaaaccgtgctgatatgatgggctattacggacggaacttgcacttcgagagaacactcaacgcgagatggctttgagagagaatatcgagggactcctcagggcacctaccactcccaagctagcgactcgcatccaggttcagtacttgcagatcaagatttcagatctttccaaggaatattggaggttaggacgggagtggtggaagattagaacttcgtttatggatggcccgttgaaggaatcgattattgacgcgcgcaaccaaaatggtatatgcatggtgtgctttgcgacgattgtgctgggaggggaggttgctgtgtcagagactgcggatgctgctatcgtcgcggtgggaaacagttttcggttggccattgcacagtggaatgttcctgctgtgagaaggatcggggtttcaaactcgacaaaaaaagaaaaacctcggtttcgggaggatttcaagactggcggcccttcttattttcgaatcagggatgctgctttacttgggctgatgaatggtagctggaagaacccgtcggatcatattcgagatttaccgccgaaatatatgtcgtgaaattgaaaaagaatatatatgtttgctcaatactccgtactctgaatctcctttgagaaatgtcccttggaaaggaagcttatggtgggtgttggttgacagtctggaccttcccgattaggaccgacgtacatatgtagtgttctttaattgttcattccccgccaccctcgacagtattaaactcgtaccttaaaaaaacctatattcctcaacaatcacaatatgtgggtggtttgaaatagagcgaaaaaaaacgaccactatgagattcgaactcacaatctcccgatgacactataaactaggagtcgggtgccttaaccattaggccaagcggccatccgtccttttggatccacacctatttatcatattgttggaggcctaggtggtgttaaataaatcccggcccttacattgttattacacgtcggatttctttaattctgacacttctactttaattttaaacgggtatgaactatagattggttcgttatattgagtttgaaatcccaatactcatactaacatcttataggctgtttcatgagggattagagtattcctgtctgaggagtcagagcctgacatttttctagtcttaaattagcagaacgaacgctattcttttcttctcggaatgtcatatactaggtacagatttaaaatgagaccgaaaggactctagaaagacatataaagcatatatttcgcaactaatcatgtcgatctaaggtgtagctaaagaatgagggaacataatctcttcatagtgtcatagctggaaggacaagtagctataaaagtacctccaggagcaagaataacagtacggagtagacatgacgggcttatcactctataatgtagcttctatctaatcatttcatactcttcggtgatatacgtgaatgttgcggcgaccaggagaagtagttcagagctaccaacagggacacttaataagaagcagagagctaagttaggcaatggatgaatttatttagaagattcataactacattatgactagacactcagacattctgtagccatcgcccacgtgatgaccctactctgcttaactctcatataaattcttaacatatttccatattggcttgtctaagttagctctcgtttttcaatcaatacttggaacaatcgactgatgcctcatcaaatcacgtgggttgttgtaacgtgaagttctttccttggacgacatcgcttcttgtcatccgacaccgtcacctaaccaacaccatatcaaatcagtacctgcaccacgctgttatggggttcatgagcgccatgcctcatatcaagtccgacacggagaaaagatatgagccttgtcaagtgttatttgaccaccaagttgcctgcgtcgtctggttcaaagatactcttcaccactatggtgtccccacagtcatgttcgagctttatgtccttgtacaagatattgacgaggcggcagaattgcttgttagcgctggatgggtcattgattcagaagagccacttacagttgggagtgcggaggtggaactcccacagaggcggcttgtttctccgactactcagacaacaactgttcttcttccggctcaagagtagaaatattccctggcagtcgactcactaagtgacgatgcgccgttgacagcggagtcatcaccggagaatatctttttcccaccactaccaggcttcctggatgcactgattgagagctggctagactgtccttatgaggatggtatgttgccgattcatttgacctgtcaaatctccaatctgtacgactatgtacccgctctaaaagaacgatcattcgccgaacgaatgaaatatcaacaccgccagttccacttcgacgggttggcgggaatgcggacaggcaccatcccattcagaaagcatgaacgtgtaactcgagatgcattattgcagggccagtatgaactacgggaatgttcggcgtttcatgataatgaagaccttcttgatacagggaggggtatatccttgtgaataattactatagaacttcccatcgtctagcgcttcagatgcaaaagtctttgttgattatcacggggattcagattgatatgcgaagacacggagaaacccatgaataagactaagctgacctacaaggtagttacagtcgattcgattatatacaagcaaaatctaacctacactcacatgatatatcgcccaatagaggaaataatataatctccagcaacaccagcgcaacaggcttgttattcttagcataacatttactacttgacttgcaagatataacagacattagatcatattgtgctccctcttgaccaagtatatgaaaaaagaaaagtcccaaaacggctaaaacgacacaacatttcgttttagagctcaccgggtcataataagggaccgagctggagatataaaagaacgacaataatacagggtgggaaggaaaaacgagggtatcatggaagcgaacaactccaatgggccacaccgaagtagaagaagaagaagaagtgtaagagggagtacaatacccagttgcaggtcaagttttccaaggagagcgagaaagcgagagaagcggaatacaggccacagccaagataaagggagaaacaaagaaaaggatgagccaaaggaagcaaaccaaagggtgtatatcagtcattagagattagatataatcgaagatggaatcaggtcttgaaggcaagacaatagtagccatcgtaggccgcaagtctatcctcacagaaaagggcgaaaagacaaagagggaggaatataaagagggaattaaaaggcgcttggacagaacgtgaaacacagtgtttgttcaatcgcctgactcaaaaggaaggttaaacgaagtcaattcaggcggcgacatatgatcaatcgcgcagcccgaatgccttccgaagaaggggaaatcgtttctttcgtcccgacccagcgatcacgacgtcgcgcgccgaaatcttattgtcatcggggttcgtgatttcaggggtggtgtcaattttcggatctggtctgtcgcggggtgcctcggtctctttcggagtcggagatgcacagtgagtggcattgtcattgacaatgacgcttccattgtgtgctgcacctgcaccatcaatcggcggtgcggaatcctgcgtccggagaacagacgacggggcgctgtgtggctgttccacgactacctggagaggctcttcttccttgccattggggtggaggggccaagagtctggtcctgtcgaccggcgttgagaatttctcttcaccaacttggacggacgagtcggctccgaatttccggcagacacggtggttgttgtgacgccgtggttcccattcaccatgccctcgttgcgtaattgatcgaggtccatacgcgaccgctctaggggtgtctctcttcgcgaggagctttcaacttcagcttcgggaactctatggtcagagttcttgggtttcttgatgccaagtcgggcaaggagtcctggcttccgactacggggaggcgtcataatgaactcctccaagtccctctgcgacatgccacgtcgtttggccacagctgccattccagacatactgattccattctttccgcgggaacctggcgaagagggcactggctgggatgcaaaaactggtggcgcttgctgctgagggctttcttctgaactatcgtccaactctgttgagtcaccgtcgtcggcaccttggcgacgtgggataccgcggacagggcgtaacttattgtttccaagctcatcttcatcgctggaatctgcgaatcgactggtgaagacctggggccgagcttcatcctcgtcatctgaattttcgaaccgagttggacgcgccgtcttagggggcgccttggtgaacttcgctctcggcggtgccttcttgtttgtcgagaagaacgaatatcgctcagctccagtaggtcctcgaagagtcttccgcattgtcccattcgaggagccggatgaaagaggacgatgttcaaggggagagtcgttgcgctgcgttggcgattggacgcggacgttagtactagcagcaccggctctcagtgtccgtcgcatggaatggcgatctccgcgcggagaagtgcgtttgaagctgctggaggaatcacttccatttgacaattgccggcgcagagtgacagggatacctgtttgtcctcctacattctggaaattcggagtaatggacagagacagtggacgcggtttagccttgccacctcgcggagaagtatcgttgcttggccgccgaggatcctgcatactagacgtgccattcacatccaccgacacggcccgggttcgcgtcggaggctgtgcttgaagactgccatgttgagcggtggcgttgcgagtttccaactggagtggccctggcgggtttgcaaaaccaaatccatggccaacagaagaagcaggggattgctctaccaggcggttgaccgaggttggagtcggtgtcacggagcgctcctcctcaagtgcttgatctgtcacatcttgtgactgactatccacgatggcggctcgaccgataggcctcggtgtagcgtcccgagattcacttgcattctcctcggtcggcgccgacctaggggctgaccggctgtcgacaatagcattgatggacccaaagccatcaccgtccatgtcttccatatcttccgctgcatcgctgtagacgctatcaccggactcctcctcagtatccacgtcttccggatttggaacggggctcgccgcggcctggggtctagtcttcttcgcagtcgaattgagactgcggtctgagttggagggagggaacccgcccggaatcctatactggtccatgctagatctcttcttgtcaacactgtgccaagttccatctgccgggggcgtagccggctcgacagcaatagcaggcacagacaattccgagcgcatgctggagtacggctgtttctcaatgacgtcatccgtgactatggtctctcctttggcccctggcttggtatacaaattcggagtatgcgaagtgcggttgacagacaactgctccagaacgctcaagctgtgtggccggaagtattcatttgagagcgacatatccggccttggtgccacatcagatgcagacgaagagctggactcattgtcactgaaatctgggattggcgacctcttgagggcaccgcctcgggtcccccgaatgctaccgaaagatggaagaacttgccggggttttatgactacatcccagtcatcgtcactcgtaaactccgcgtgcgacttctttttgccaacaccaagccaacccatacgagatttggctttaccgccgggcggggaatcaggcgtatagtcttccggcgaggtaggagggctggctggtacattgacaacctcagcctcatcatcgaaactgaccttgacagactttttccgggtatcaatccgggatccttcgtctgaagccactgatgtaccatctgacagctcgctcggtggtaggacgcggccagttggcccaagcctcctatcaggcgataaagaggttcctcttgagtgtttcaaggctgatttgacaggagatactgatctgagtggaggctcgtgaacttgatcaccggctccagctacagagagcaatctggaaaaacgtgcagttcgacctgggctgcttgactgacggtgtggctgctttatttgcagttccgacgagggcgatgagggcactggcgctgactctacgtgatcagtagttggcgatgcactcgtcatccggtttctgctttgccgttcagaggtatcttcgacattcgtattgtcttcgggctcttcttcttcccgaacagtggatggccaccgctcaggaagagctcgtgaggatgggtgttcagcttctacgttagccacaacaggcaccgcgctaccggtatattggtccagagaatcgggctctataagcgaattgtgaaccttcccagttcgaccattcgcactcggcctgttcatgggcacgccaaccgattgggcagtagcatctgcggtgccagccaaaggaacatgtttgcttacaacagggctttcctctagactgccagatcgctgtgctttaggcttcccctttggcaatttgtcagatacctcagcaatcgattcttgaatagcatcgtgaaggctcatcggattgctctcagacatcgtcatcggcgaggtaggtcgcgaacccattgggtatgagaaattcactgaattccgactcgtcgaccgttccatttctggaacggtcccaagactagtcacccgttgatacgtggttggctgaatcggaggccctcgcccatgttcccgatccacacccctcaccccagagcgcggcgaagacgatggggaggaacgcatcgacggctccatactcaccgctcgtcggttcggcagtttccgcggcgaaaacttcgtcgggagagtaggtaacggaggcacatcgacgggaatggcccctggcccgacgggtccggagctggtagctgggcgatggggggattggtcgcgaaaggtgcgtgcgctcatcgaactattactgctggagcggcgcagcgtggcactcacgctggccgagcggcgaccgttaacggggttggcctgcgactggatcgaggtgcgccgctggaccattcgttttgtctgcacattttcaatgggggtcggggtgggtgtgcagttgcggagcgctgttgccgccgcggcggaggacaagctgactgtggagggttgggattttaagaatgcatggctggcggcggactgggcagagtgcgcggcaggtgtggagagtggctgggaaaaggagtcgtcagtttcattttcatgcataggttgcaggtacccgttggattgcatcaggcgctgcagcgggacccatctgcagatagggagatctgctattcttggtagaacacacctgatgatgggcagaggcacttctcttgcgacgcccgaagaccattgttcagagtcttgggccttgtagggatcgaaggggtcaaagatcggatggccggacactgctcggtgcagcgccgggatccgaaattgaagtggatgaagggatgtggatctccagatgattatacgagggtagctatagcaagaagtggaaactagaaaactgagaagttgaggggaaacaactcgggagggatcgaccaagtcagagagccagtcagaaacaaggagatatgaaggtggcacgaggtaaggagagctgtaaaaaaaggcagaaagcaggaaaaaaaagataaaaagccgttcgagacagatccaggaagatccgagatcgagaggaacttgcgtcatgactctgatgggtcaggcaccagaacttggtttaccgccttggtggaccacgttttatggggtatgacctcggtttgtgtacagcatacctagattcattcttatatccctgacacggcatatatctcactcatccaacccacatatattcaatcctaacaatggcccttccacccctccccctccccgcaggcgtaacaagccgcaacattcaaacaaacgatctaaacatccacatcctagaagccggccaaaccccagagaacaataaaccattgattatccttctccacggtttcccagaaatcgcctactcatggcgccgcgtgatcccaaaactagcagcagccggcttctacgtcgtagccccagaccagcgcggcttcggccgcaccacaggctgggacacgcgcggctatgaagacgtcgacctggcaaccttctcactatccatgctggtgcgggatattgtgcttcttgcacacgcactaggctaccgttctgtccggtgcgtcgccggccacgactgcggcgctgtatcagcagccgcgtgcgccctaatacggccggatttcttccagagcgttgccctcatgagccatccgtttaacggggccccggatctaccgtttaacacggcgaatgcggatgccgcgactgggtctgagacggcggcggcaggtggggcgggtggtgcggaggggtcggctgctgcggcggggattcatgacgcgcttgcggaactcgggcgcaagcattataagtggtattactcgactaagcaggctggtcctgaaatgtcggatctggagcctgacgagatgcatcgcttcttgcgaggatactttcatctgaagagtggttcgtggctggggaaccggccacatccgcttgggaagtggtctgctgctgacctggtcaagttacccgggtactatatcatgccgttgaatgagacgatgcctggaacggtggcgcatgatatggagcatgagccgtccggcggtctggcctcgcactcttggctgccggatgaagagctcgcagtttatgccgctgaatatagccgcacgggcttccagggtgggttgaattggtaccgtgttcgcaccgctgctaggggccggtatacgaaggactttgatgtctttgctgggaagaagctcgagccgccttgcgcttatgtctcgggcaagctggactggggcaactatcaggagcccggtgctattgagaagatgaagaacgggatttcgtgtgctgacctgcgtgtctttcggcttgtggatggggttgggcattggacgccccaggaaagtccggacgaggtgacgcgcgcgattctggacctgatcggaggtgtgcgcgactagattcttaatcgatgctattgggcaattacgcttttctcgattcccatttggaactgtgaaagaggggtttgagagatatgatgacgttatgatgggctatgagctgaacaaactggatacattgcatttgcgctcacaaatatagagaaagccctagagcaattaatgatgaccgggagctgaagaaccttagaacctcgtctctttggacaaccaattgctgattgtctccagtgtcctcaaaggcaagatcgcaaggatgctagagtccaaagcctctccatcatcccctttgaaaacttactgagcgacgttacgtccatcttggggttgcgaactagtattcgcttcgtgacgtcatccgaagatcgcacattggcaataatcagcattgggttgccacaaatggccccaagaacatacttgatcagttgataattgcagactccagatggaagcctttcccccggagatagatgcttttcaacgtaccgcgagttgtttgcgttcaggtatgccgttttagtcagaacgtgtacagctcggcgatatcagaacctcagcagggtgagggggagcttggttgtatgaatttaaaacccaattttgagcaaattggaagggacgtctactatagaaagagaaatattttatgtcttcatattatatgactcattcttcgactcatatggcggctagcattttctatagaatctgatccctacgatactgaatacattcaaaatatgcttttatatatctctactctgaagtctaaagagtcatattcgccagatgacgtgatataccccgtagacagcaattggtcagagaatagattgaattggatacttgcttgtatcaacattgttgaccagtaacaggtgaatagacctatcaaatttcgaccagggaatggaaacatccggtctccgcggtgtgtgcatgcgcccgaggctcccttttcttgacctctcgcttgtcggttgcactccgtcgggggatcgaagcaaggctattagcatatttagcaacagcgaaagcggtagccttcgaattaatcaggaatgcttcgtggttgagattcttgaagttgtccccgacagcatggtaattcacatcgtaggatacgtttgcttggcctccgaacagttttgcctctgcttcggtcttgaggccttcagcgccagtgaaaagtccaccggcgggaattccacgagagatgaaaccctcgtagtcggatcggccattaaactcagtaggaacatagggcagcttctttgacctgaaatatttctcaaacaaagcctcaatctgggcagatcccgctggtccagtctggttgaaggcatctccgtcaccatcgtagatcatgagcgcatagttgggcgaggcaatcatatcgaagttgaggtagagtctgatttttgctagttcatctgcgtccaggtgggaggtgtaatactcgctacccaacaggccgaactcctcagccgtccagaagaggaatctcacggcattcttgacagagaatcgcgtcaacgcctttgccaccacgaggttgctaatgattccagagccatcatcattgatgcctgggccggcatcgactgagtcggtgtgacctcccagtgagacgacgttattgtgatcaccgccctttgtctctgcaattacgttgaatgtagtgcgattctcgacccggctgtccagtaaaagagacacagtcacagcgcccttctctgctgcactgagcaggaccttgccgtcgacatcagaaactcccgcgatggcggaataatcactggatacgccacccagggttccactaagagaccctgcaacgttgttatagacaattaccgcagcggcattggcagcagcagcaagtaacgacttttctgcgaaagtgcattctccacgctggactagggcaattgcaccagccacgtcactcgggtagtctgatgcactgcatccgagattcgagaccactgccagctctgcagtaacctccacgctaggactgtaggtcatggccgatgctttgatagactcgccctcaagcgtcagcgaggtatttgcagtagtccatgtgtgcacctgcggctgcttccacacattgtaatagccggtcttcttcaactcgcgatagatgaagtcaacagtatcgttgtgtgctgcactgccaaagacgcgattacgctcggggtacgcataggcgaaatcctcaagctgttgggtgcccttcaggaggtctttcagtcgaatggtagagggaaagtcattctaataagtcagattacctaaacgacggcggagatccaacatgtatacataccggtgaaacaaggggcttcctccggccagcttcagccaggcccacggacagggttatcaagaaaagccacttcatcgttaagtaatgcgcggattgatgaccattctgagccaggggcagatgtgattttatacccattcttcgtattgtcggcgaccatcacgcgatgataaagcgcaatggtgcgtgattggcagggccccgatggatacgccaagaggccggcttgcttcacttggcagaggaggaagcactttcatagggccggctattgtcctgcaggcggaatccgacggcccttggtatgacaaaggctgaggttaccttgccaaggcattgaggtgggaaggtactagggatagataacattgttgcgggctgttgcgctcattatccagcacattgagccttaagactaattatttagtccgtattcgcaatatatttgccatgatctgttgattaggattgtaatcgtaccataatcagattcagacggccgtgggctaactcagccaactgcctattagagatcagcgttgcggagtactggaatcgtgcctaattcatatccaccttggaaacgcctatctcaatcatatcgtcctaattcataaccgggcatttaaattcaggttcaaatgcattcttcggagttccacttccgtatgagtattacacgaagggtattcgttccgcgtatagcaggctcatctgcagttgtgggaaagagctacccccgcggaatgaagtaattgaatcgcttggggaaagcgcggatcatgagtgagaagatgagaccataggcagcaggtatgagtggctctctttagagcaggaaactgcttgacaccgcataaaacgcttgcagataactatcatcggcgaggacatcccgaggtctttccgctgacgcaataagcgctggtaactaaggtatccagcactccatgagcctccgctgagccaaagcctgttctctacgcacaacatggtctgcctacgtccgtacaccgccgcttcctaagatggaagaggctatttcgcaaacgcccttgaatcacctaggacacatcttcctcctctaaccaatgtcgctcgatgatatcctcctagagtgcagaactatacctacggtctactctctcgtgttacccggctcttcatcgtctggaagcaattcatttccctcgtcagtttcgcatattcgctgtgggcctgttggtatctcggctactccgtggcggaccttgtcgtgagatgcaatgccgcgaacaacttcagtgctgagtgggttgatggtagataatcgcataacccaatttgggtcgaggcctctcgaccccagactcaacccggacccagtgactggggccccagaaaacccagtttggacccagtttggacccagtttgatccattttttgcataaattaggtcttggcgttcataaacctgctaaaccagcagaattacacacattattagcgtgtttgtatagtttgtagtccaatttggctccagaaccagcactgagttatgcggaaacatagttcgaaagggagcactggtgtaagtcataccgctgtagggtatacctaagtaagttggaggggaagttgatagtaataaccttggaagcattcagagacataaaacagatactagagagaggtgtggataggggccctcggatgatgcagaacagtgggccttgactcgatatattagaataagatagacagagtaaactctgataaatcaaaatatctgaataatgactttgcacacttatggggagcccgttccacggtaccctttgactgttgtaaatgaagtagatctgttcattggccgtcgaaagcaacgtggacttgttaaacagctttgacaggataataagtgtggcccatacatagttcgttcgtcagcctgggtgtttcgcgattgttcatctaagtgcaaaaactgcaagacacaatgccctttagatgttaagctcgatggagaaatatattgcttcttaaagccgtatatgacgagtgtaggcacccacgagcggcaagaatggatagcttggttgatcgatcgacctcgagaaaacagattgaagtagaacgtcgctatagcctcattaaacaaagatgaaaggccctcaaatattgcagatctagacaatgctcactacagagtacaagggtcaaggcgacacctgaggtctataaaaaagtcgaggcaaccttggaaatggtcgggcatgacagaggtcagcgaataggaagtcgtgcctgcccgaggcctaccatggttatggaatatgtaccccaggatcaatggcaactatattttcacctacaacgacaccgatgaaagagaatgttgcgattctcatctattcacatgtaaattgaaggaacatcgaaggcaaaaggcgtgaaaatttttctcctcgccaagccaataagatacatatgcaagatgcgcttctgcctaacttcaatatgagctagaaaggtaaaacagcggagtaggtaatgtggacatggctctgatttttgcattatgagctagctacaaggaagtcatggctgattgagggcaaataaatccattaaagttttcatcagcacacaaaaagttgcaaacatgagatcgtcatacaaaggaaaattaaatcacacgagcaaaaggaaaaggaaacaaataactatcatcacaccatggacgagggacaagcgtatctagcccccctaggagaaacccagaaaaagaaaattacagacgggaaccgtggatgaccttgtagtcgacgacgagctcacgaccaccatcgttgatgacgagggcacggacggaaccacggccactagcaaaggcatcactgatgcgctggtagaggttgccctgggtgatcacactgataccctgcttgacatcaccgctctcggtcatggcgacgaggctgttatcatcacggaggtccaggatgcggtaggtcttgaagacggggccgagcatggtctggacaaccaccgaaggagaggggttggcgacaaagctagactcctcctgcaacttgcgggtgaagaggtcgacaccgaggtaacggtgctggccagtctggggggagaccgagatgcggatgacctggcaagggcggccctgaaggatcaggatgtccccgacacggatgaagtggcaagggatgggcacggtctcgccagaggagccgcggttgcggggctcgacgacgcggacgtttgcacggggggcagcgacctcgccgtgagactcctcatgctcagagtgggagaaggggtgcatgacacggtcggcagcgcgctcgacgccacggcggaaggagtggtactggccttcgtcgtcgtagtaacccattttgcgagtaggggcggtgtcacgggtagtggtagatgtagtggactggggagcgtttacttgggatgaggtggagtaacgagcacggggctgaacttcacgaaggtagacgtcgtctgccttgtaagagtcggtctggagttgggcggtccggtcgtacgaaacgtcgacggactgaggttggtaaccgtaggcggagtctacgggctgacgataacgacggtcgtaagagacgtcgaggtcgtaggagggggaggtacgttgacggtagtctctttcagtgaggtcgagttggttctcgacgactttatcgtagacttgagtgcggtcctcgtagtcaacagtgggttgttggtaactggggtagctgggaaaggttgtcagcccacatgcacgggtaccatatacatataaacaaaacaagcgagacaccgctaattgaagtggatcggggtttgtggacacgtaattttagtccccggcaaaattcgcaatcgctccatcccaagataggagatctcacaacaaatatcgatagttcagctgcagggccccccctccccaaannnnnnnnnnnnnnnnnnnnnnnnnnnnnnnnnnnnnnnnnnnnnnnnnnnnnnnnnnnnnnnnnnnnnnnnnnnnnnnnnnnnnnnnnnnnnnnnnnnnnnnnnnnnnnnnnnnnnnnnnnnnnnaaggggagacctggggctggagtaaaaaacacaaaaaaaacaataccaggaaaaacaattacataccgttcacgagtaagctcaacttcaggggcgtagttgtgctggtaggactgcgagtactgctgcgattgctgcttgtactgagggtgctcttcttgaatgcgcggacgctcttcttgaatgcggaactcgatgtcttcctttctgtgaacagaagcgggaaggggagcagaacctcgagtatcttcccgttcgacgcgcgaagtacgatcgaaattgacttctccctctactcgagtctgagtagtttcagagacagcgtcactccggtacgacgacgggaagacactgaaggggatggggacacgggcgtcaaagtccagattgacggacttctgagcgtcttttctcgaatgcctttcgaactgtcgttaaacaactcgaaagactaaacaagaaaagacttgaaagggaagtctttctcggggtggggaggaggaaaagagaagttcttttgatcctgcagagatagatagatgattggaatggaggggaagaaagataagattaagagccggggaatgttagattgtaggaatggaagaggaagaggaaatggaccagcacagtcggcgagcatcacgattatttatgccaggccatttgtttacgccgccttcccggtttgagttctcggctgatcaccgaggtactctcctccttactgtctctctacgctatctgaattgtcctattagaaccgcacgatatgtctgatggaagtcctccttctcgttctggtcaatcattcttaaaccccccaggaaggcatcttcattgatggatacccgagctgcaatcctccatacacatcgggccctttcgcatggggggctggccagcctgcgcgtaatatcacagcaccactactatatcgctatggcaacctccggggcgaatcggacatctggatcctctttgtgccgatcttataggctccatcacatcggcacacttgcattgggggttgcggagacaccttcagcgtgattattattattattattattcattccctcggctgaaaaaagcgtccgtttgttttgatcctgccacagggcgtttgccaggcagccattggcctatatctggcactattcacaacatgttccaggatacgagacactaatacgaataccaataccaataccaatgcacgtctccaccggcaaagtgattcatcgagatcattagaccacctttgggtcccagcccgcctcgccccagctactgcgaagcaccagccagccagtgcatgcagctcatggctagaccctcttaccgcccaagaagccgggaaatatgtttcaaatagcggtaattgcccgtactttggttttctcataatgagacatctgaagagggtggttaccagccgcgtgtttatgattccagtcatgtcgccactgctccaatggagtgattatcttgtttatgtatcccgttttccgaggtccacggaatacccggtactatggtaccaatccgtgctccgtaagtggatgtccattacggagtcccatactccgctccgcacagagaacggagtcatactgcagaagaatctcagcggagcacgcagtacaacataatatcgtctccatagtagagcctagcaatttcgtacatgtttctatttccacttgttccactcactactccactgttctttttcttctctcattggttctttcagatattttcgaagtataggatcagacccctttccggggtcaactcagctgtacatttacttacagagtggtattatattacggtcgcataatttctattgacagctagaagattatactatcgtaaaggtgcaaaaaaatctatgtaattagcgacatacgcccgtatttcttcatatagtagctatgtagcgggttcgaaaatgagcaagagccacaagtttggcgtttattgcgcccgataccatagacttatacgagacctttcctttatgtatttcggcgaatatcatgcgtggtgtaacgctcgaagtcttgatatgcgaaaggctggtgttaagtccctggcgatatagacgttggttatatataatttccgatacaagaatgccatgagaacatatttcttgtatccactactccatatacgacgtacatattgttgaataatcaagaaagcgataacaaagcgctcacgcaaccgaagttatgctctttgagaagttgcagctgggatagctctagaccatcgcgatgtttcccattcgtcacggaatgcctcgctctccgcattttgtgtcttgtatctccataggagtagacttggttggctaccagttcgccgattacagatgccgaaatcacataaattgatgcccaattccgagcccatggtgtaatatgcaaggcagcgaaaaggtaaccggctgcatgttgactctaaatatagtcggtggttcggtcttatgttcgatacagaatgcagcatatcaatgtattaaaaggctgtaaaaggctgtttggtacagcctatcaacaaggtcaagcaagatcccatccctggagtccttcttgataatacgttgattcttctgccattcagctatgaaccggtacgttatacatggacaaatcatctgtctataatatactccatacttgtggaaaaatatagctcgaatatcggtaatggacagaagagtagtgatactattcccactagaaaaagaaagaatttcttacaagacaaacagccatatatcggccctgacttttcccaaacaccaaaaatgaaacccaggcaccagaacggaagacacaagtggaagctagacaggaagaggacttcgtagaagaatgaccataccgaacagtaagacataagagtcatagcaaagcatggatcacaaatagatagatagaaaacaacatgggcaatgaaacctcgaaaccaagcgagatgactcgccactaggtacaaaccacccttgttttcaaagatgattcatgacgccggaccagtatggaatgacatggagaagagaacagagaagaggaaagaaaaaagcaactgagatgggttctagtatacatcgatggacggtaaaagcaaattaagatgggtatcgtgatgcgaagcagcggataagctcaaaagatgatagagcgagaagaagagggaaaccagctgtggtagtggcggagactaccgttctccaaacttgccgaactcctgttgccatttgagaagatggcgagtgagcacgtccatcatctccacgctgctgagctccttgaaatccctttcatggttcgtcgactcgccatagccgccgtctgtggttgcggggccggactcgcctccgtcactgcgcgcggatggcatatcgttctcaatctgattgaccatgctcttcaagagtaggccctgggcccggtcaccgttgccagtaggtgtggaggagttctcgctggaaacggccatctccacttgcatgcgtgagatgaactctaggatggctgctactcggcgcttcatttcgttcatcgttgttcgatgtggatgcatgtgacgcggcctgcttggccgtcctgactccccaccattcacgtgtgcgccattaacaccgctgtagccaagtcgaggggagtctccgccgacttcgtgggactggccgcggcgcggcgagttcgccatataaccgacatctccattcccattggtgtcccggtcttttgtatattggtttcgaccaacacggccgcgacgagcgggaggtcgaccggacttgcgagttgatggacgaacaggagcgggctcttgcggggtaggggtgttagggcttgcttgagacggttcaggctctggcggcgctgtcttggttggggaaccggtttcgtgctcggattctgttgtagctgtgttagaaagtgaaaaatcgtccactagagctgtgtcacttaccatctcctttgcgccggtttgatcgttctttccgacgtttcgccgcttcaggagcctctgtctcgccctcgtcggggtcatttttaggttctttctccacctgacctcgagacgtggctctctgtctgcgacttccgttgactgcaggctttggtttcgcctcatcaccagaaggcgggtgagatgctatattgctatgcctcgagacggcgctaggtgagggtgaagtagttcgcggacgtttcgctcgttctctattcctgggtaactagtcagccatattatcctagccaatgccatgcagcttgagaatacgcacgtcacactgtcacttcgacttcgcttgcccagatgtgtgtctgtctcatccgcattacttttagtctcagccttgctctcctcaattgcgcgtcgtatcaattcttcttcatcgtaagcagcatcccggctattcattgttgatcgtcgcttggcgtgcgcagcggcactctcgctggtccgggacttgggatccctggaacgccgcgatatatctctcgaggaggcacgagaggacgggccgggggacgggggaaccgccgggacaaccggggcgactggcacgtcaggtacctcaggcaccgccggggttggggtcggggtcggtgtcggggctggcgctgacgctggcgttggtgtttgtgatggcgctggaggaggagggggtggtggcggcggcggcggaactggttctggtgcaacaggaaggtaggttgaggatcgttgtctgcaggattgtcagtatgcttcttgaaaacggtatagatggtaacatagagtagtcatttgtatctcataactgctcgggggagtgatcgtgcccgaggctgggtcaaaaaaaaaaagcccctccaagcagcaagaacaaagcacatccacggagatatagattgacgacaaatgcaggaataatacgtagggccgagtaaatgcaaagaatagcattgtttcacttacccatgaggttcatctttgatcttgtgcaaatccttccgacactcctcacaaaaatattcgtcaggactcgttgcctcgtccatgattccaacacaaccaccatgttgccaaactttacacaagtcacactggataaacatgctcccaatatcatctgatagaggatcagatagatcagtggggacttgtcccgactccagcttgatggtgccgcgaccgagggcctcgcgacgagaagaaggcaagcccggatattcttgctgaccacagagacatcgagttacttcctcctcgtcatcatctaggtcatcctcgtcttcttcacggggtggatcatcgtcgtcgtcgtgagcgcgttggcgctgccgcgtatgtggagggtcttttgagccaccctcagcatcatcgatggactgagagcggtgactggtcgattcgtgaggagagggattcttatgattcgatcgagtgcttctctcacgagtaagagaatttgaggagctggaggaagagttggtttgttgtaggagggcaggagagggctgggaggtgcgagcccgagaggaacgacgaggagacatggtgggggaggtttgagtatttgaaggaagtataaaagagagcactgaaagccagattaaggagaatcaacagatttccgagacgttggctggtgtggttctaggtaactcgagaaaacccgtttgcgagggagctctcgcgcgcgattgagagctcttggggagggtgcagagtcaagtaaaaagaagcaggacaattggaaacaacagatatgtataaaggcgtcgcaaggctcgatgaagagcccgatgactacatagtccgagaaatgattccttataatggcggggaggagaaagagaaggaggaaaagcaccggaacgggactccaaaagatccaatcgccggtttccccgctctcgacgcctctcgacgcgcgaatctttcaccactcatgctgttcgtgtttcatttcctttttgccctacatatggtggaattgattgctggttcctatatacctttgacattattttggctatatatgttaatgcacaatggttttgtggccgactaattggggttgtatcttccactagcacaacacgatggagcaatgagagagcttgcaagcgaaagagagttgattgataagaggacaagacacaacatacaatactgtatagggctgccgatattctcccggtgtgatatatcccagtggaaaaaacagagaacagagagagggtaagaaaggtctaacatggattgacggcccttgaaccgcaaaactcgaccttgaatcctcctatgctgtgagaacaataagatcatcaagaattaatgttcttatgatccacatcgtctcaaattctgtatgtcccatccttcgtaccgagtgtgcctctcatttcgggccgaacccgttttcagcgtcggcaagacaactttggtctagttgcgcaatgcaactcgtagcatccattcttcccaacatatagatgatgtagttattcctccgaatatgctctgggtgcattggtggttggaaaggcgaaatgaggctttgagcaaagccctccggaggggttcaatcacacgcgatcgaggttcgttgcactagttggctaggtatgggttgtactgcgatcagcaaatccatagccaacattgaatcaatccctcacaccagctctgagatgctggattccctgtggatgcggatatcgggagtacctatctgggagatgatcggagggcgggctttttttgtctcccattagaggtttttgtatagactgatgaccaatgaccaaaggtatagtgcatggtagcacctagaagatcagatcgaacatgtgctctataggtgcctagtctgcaaagtagttcttcagaggcgtgtacgtgtaatgccacttctctccgaagtcattgggtagagggattgccgaaagtagattagcctgatttctaaattcccgtgacttgtctctttctcttcgtatccctcaacccctcctagtagttattcaagttattcatttgtcttgtctctaacactgaatctggaatcgagttcactcgattcccaattttggatcctcgtcccatcgattttggatatcgaaggtgctgagtaatagcaccattttgtgggtaggttgatattcgtgtctccgggattgtggacagcagaggaacgccaggattggattgaatcccagttgcatgttgatctcactgcctgtacgcttctcgtgagcttatttttaaaaggacaaaagcttatgactgcggatcacagacattgaagacattacttgccaattcgacattcaacactgtccccgacttttggattattggccccttgacaagaaaatacggtggcgggggataaaaggacagagcgaaagggctggaatatcatcctcttagcatcgtcggcggttgatggcgagcgtggatatcttgcatgatgacagctacattgagtatgtctcagggacatttggtccggatgatcggggattccccaattcaggaaaacgatcaactagtggactgaatactgacgatgccatgtagacggggtgttcaattcgtcccccgatacaccctctgccatttaccctgatcgtttgatccgtcctctacctagacggaccctccgttcacgcctctcctccgatgctgccgacacactattctatcctcctacgccgccggcgtctcaaatattctatggtgtctctgcggattctgaagaggcggtgaatgaatccaaagtatatgtgcagcagacagtggatactgaattgtcaccggaggttgagaatcatgaatttgagacgccagtagagttggaaagcggtgatgaaagcggtccgatggttgttcgaaggagtggtgttatccggagatcgtcactatcacctcccgtgtctggcaatccacatagcttcccccacgacacaccgcagacaaaatcttcaaccggggacggctacgacgcgtttgagaatacgaataacaagaaaaagagaaagatacctacccccgggaacttgggagggcaccattctgccttgtctccggagttcgccagtatgggcttgacaaactcaacccccgtacgggcccctactccaactgatgccactggcacatattatgggagtggaaaccccgcgtctcctttaggaaatgggatatctggttcaggaagaggtcggttgggacgtcctactgttcgtagcagcagcagaaacccgttatcgcccaatgcccagcatggatggttgaatgcccggacgcccagtcggcgagacgggttgatgccatcccctggcccttctggtatgcaattttccattttcccattgcattatttgctctaacttctgtaccaggtgaatcttctgaccagggaatcatctctaccgcgatcgccaatgccgcaacgctctcttccccacctcgaggtcctggcaacgtcagccttttggaaaaagagaaagaaaataccactccgacgaagacacaattcacgttcacttgtgaatctgactcctctaagggcatggcgatgcagcgaaattattcaatcccttatcgatcccccacttcaccactcggtccggcaagtcaaaaacagaggggcatctccacacaagggacacagactagctccatgaaccaccaggccccacccgcgcaagcacccgctcaaagtggggagccgacccccgtgggccccaagaaaaaacgatccccaagcagcacatacgcattgtctgcacgtcaacgcaagatccagcaacaatacacgaacttccaccatccccctagtctcgaggatatctggatttgtgaattctgtgaatatgaaagcatctttgggcatccgcccgaagccttaatcagacagtatgagatgaaagaccgcaaagagcgcaagcgactggcggagaagaagcggcttttggagaaggccaagatgaagggtcgcaagaccaagaaggcgacgaagaacgcatcgaagaatggctcacagcagcaggcatacgaccgcgcttcggctgacaactcctccggcggtggatcaggtcttcccgatgatgaataccaaggacatgagtatgatgatgatgaaaatttgccgatcccaccttctgcccctgcgtcccccaccgacctcaagcctccactaccgcccactggaaattatccaaagatagcggcgtctgttccaggcatcaagggtactgcgaattctggagcaagtcgaccggcctagtcgtccttctgcgtctcattggtgttcttttgcatttcatcagtccatcattgcatttggtttttattttcgggttgacaggttgacagggtgtatggggtattttttggaggggtgttctcgggttgttgcatggaaggaaatcgcctctcagcatgttggtttggcgagcaactcatcggacaaagtcccttgttggagtctggttcctggttatctttgtacttgtaatgtccatgatgtgtatgttctgaatcaaatgtgaaatgatccaatgtccagtctcgtagcatacattcttttcttagatcatctgtttaacttcatttgtatataccgaaaatagagaggactttttgattggatctcgagccaccacacttgaaactatcccaacctcaagttggcgcgcgcgaactgcaaccccactagataccaggtttcggacccctgcaataccccagcttgctagctttgtgttagtttttgattccaggggtgttcggtgttctattttgatccatgcgtttcatcttcttgttcccgagtgattgtctttggatgaaaggcgaggatggacagtggggaagctctagaaccgcgcgctcgaaggagatgcgtttcatccggggccgcagatgccagaaaatagcagaaaatagcaacattgcgctttgttgccttcaagttctgacgaatatgccccggggactgagaatagggctaatctataaagaacagccccgggccattgatgagagtcttccattctattttcatgcatctttctttcattcattctcttctatttctattatacctcttgaatacgacgggccactttctctttgtcccaatatctagtcatacaatctcgacaatagcttcattcctcttatttggcatctggtctgccgaatcttggaatactcctctcattatctcattcgacttcatactccttcttctcgatataatatctgcgctgtgcgccatatcctaagcacttactattgctttcattcgcaccttccaatcaacaaccacctaccacatcaccataccaaatccaaagatgtctttcctagccgtcccactcctcaagctcggcatatcccaagccaagaaacacaaagccaagaaagacctccaaaaacaacaaaacgcctacccaacctacgaacccgagcaacacccaatgagcggctacccagccggcgccacgccggggacaaccctccacttctctccaccacaagagaaaagcaaaagcgccaaactagccttcatattcttttcaacgttgcgcttcctacaattcgtcttcggcctcaccgtcattggcctgtacggcaaagacgtgcatcacgaccactccgaggaagacacctggcacgcgaaatgggtgtacgcgctcatcacggccttcctcgccaccgtaactgcagccatccacctcgtcatgccgttcgtcatgcgcaaagctaagcgcggcgtcggggctggctccggttccacgatgctgctgctgccgcagtttgtgtgggaatttgtggtttccgtgctgtggttagcactctttggcatctttgggaagatgtatattggtgttcatcctgtcgtctcgaagactgatgctgcgacttcagcgcttggtgatgcgtcgaagataaatcggatgcgccatgcggtttgggttgatattattaacttggcgttctgggttatgactacttcgtgggttctgctgcgctggttgaagagtcgcaggtcagctggtgcgcttgatgctgagaagggtgagcaaatttaggtagttgagggtgtgaatgctcactttgatagtgggcttgatgggtgagatctgttatgggcagatgccttgatggcatcggatggaaagggagtttgaatagcatttgcattcgtttgtttcttttgtatctgacatttggactcgggagtcatggtgttcagtgcttttggctcttttcgtggatggcgttctctcaatacatacaaaacattaacgttctttttgagatacaccccgatgacttcaatttcaatgtagtctcatctagagattaattcctttccgtcatttacttgaaaaatactgagagctacatcagtagcttcctgctttcttatagaaaatcaaccgcttctctttttttctctcttagctcctgagccttacatcaatatcgatgcttttgattcgctcttcctgcctcgtagccttgtaagaagtccgtgtcctaccatgagcctgctgggtaggttcacttggctgtacagcccactgctgtccccgttctcaagggagcttcgttgctgtcatctgggataaagagaatgaagttgtgatctctcactactgagagatgaaccttgacctagaggctcacaatttctttaggtaaggctcaggttactacggaatacgaggtgaaattcggttagactccaatacaagaaacattcatatgcgacttatttatttctgtagattcgctggctaaagcctatcaaataggccaaatctggtatcccattcaacagatatccgcccagtctccctcaatatccccaggaacgtcaaactgcggtccaccaggcaatttgacggggttcttcaccactttgaacaatggcttcaccttgctgacctcctcagggctcagcatcgggcggcggagagtggaagcgcgcgggaaaggaataggagatgttgctgctgcttctctaatagcctcctcagcgacggggtcatcgacaaagtcgtcgtcatcgaatggtgaaaaggatgggatggcgggctttggcgcgggggcaatctcatatcccaggttgcgcgtgatctcgtcgtcctcgtcgcggaagctgaggtgctgcaagagaccgagctcgacatagctgtcttcgtagtcatcggccttggtagtgggctcagagcggcgacgggttggaattgctgttcttgggatagacacctgcgaggacttgcggtggttgaagactgggcggcggcgtgggcctcgtccgtggcgtgtcgcagtaaggtaggtcttcttgggaccatgctggctcaagctctccagggcagtggtcgactcagaagtcatggatgtcttcttggagtcctggtcgccgactttcttcggagcagtcaggaatgtcttcttggaacctcggtcgccaatgtcaattggagcagtggcagactcagaagctatagatgtcttcttggaatcctggccgccaaccttctcgggagtgagggtagacttggcatccgtcaaggtcttctggcgacgctgacggcccgtgttaccgggagtagaagtggaagtgtgatcaccagccatgcttgtggtgggtgaattagaagggttgagtgttatctttgtgccgatgggagtgtcaaggagcaatcgagttgctttatatgtttcaacctgtgaaggctgcgactttctcacgattgagagaggaggagaagaggctccgacagcgcagcctggctgattcttattgatgcgagcacatgagtcactaatacgcggttcatatggtgcgatgtagaacgcatttatgtttacgttttctcctttgtcgccagtcacaggcaacggtgggacagtcaccctttgtccgactaatattgccggcgccttaatgcgtagtataagacgatttagggtacgggtattaacgcggctcgagagtcgttttgcaccccatattctccagaagagatgttcgaggcgacgctcggtctcatctttgctggccaggtgcgatgtcgagtaggctgtttgttgtcagccagcccgtttataacgagaccaggagtagggagtgttatgttaccttgccaaaggttcttgtataagccattacttaatgtaccctgctgcaagatctcgctagcagacacacttgacatagccacaagaccttgggggagctttggctccatcttagatgttcgttttggtagtcgagcttgagatgacgagataattttgtacggagaagtataagatgagtggcagagaatttgcaagttgacgaggggtcaaatgatgttgaatggcgtggatcagtcgtactgatgtaaagtcaaggcttggtagcatcctttgtattcagcacaaacagaatgctgacaagaaaagaaaaaagagaatagaagagcttgaccggcaagtttcgaaaacaaaagtttcttgcgttattcctgtgtcgcactactttccagtggcgagatgagactttgaagctgcaagatattcaaggttgaacttgaagccgaggtaacacatcagttagagccttcgaacatgctccattggggtttaggtgcgcaagtcatgactttaaaagctgcactccacaaaaaaacagaaaaaggaaaagtcgagaagtccagagacaaaaaatttgaggaatgtagtaccccagggttcgcccttgcctgtagggtggggggaaaccccttagattcagaaccggactgaatagatcttcgttaaatctccaattgtagatctccctagatctccctagatctttccgaagccttggaaagactaaattcttcaagtatgttgtatgtatgtgcctcgcctggatcaccgggatgagccaggattggacttcaccattctatattatataaaaaccatgaaaccacttactaactactcactaaaaaaagactaaaacataaaaaataaaaaagcgtcatcgttacattccaattgcgcgtcctttcgcaagcagggatgtacagccctattgacggccaacttcctaaatatgacacagaacaccccaaatacgacctggagaaaataatcagagcaaatcaaggagctttgccgaggtgacattcacacccacatgccccttcattcggtacatccaatagggaacatctttcaactatgcgggggaggctgtaattgggtttgtattttctccgggtttctgcaaacgatctagaagatctaatcaaaaaattatgctcgaatatcttcaatttatcatacattataaggtggtcataatctatattttcatagagatttactatgcgatgaacatgccactaagttgacacgtcctaatcatcgtccgtctacgtttacttttagtcttaacatctcactcaatagataaatataaccttcgaagcgtctcagatctggcaggggtattataaatggattaaatagcataatccggagcgtctagatacaaatgcatacacatctcggtccctgcactatctactcgcgaagccgaagcgcaacaacctgcccaccataagagacacccccctggtcacctccacgagtagtaacataagccaatttcccacccggcacgatctgcacagaagtagggccaataaaagccaagctatcacccccaccagcaacgacactctgcgttccatccggcgtgatcttagcaatggcattagacggctgcgccacataagcattaccactagcatcaatcgcaaaatcatcccaatccgaatccgtatcgccggcctcgcgcaccaactgcgcaatgacctgaatacgaccgaaagtccccccgtcttcgctgacagccacccgggcgaatatattaagcgcactattggtgaagtacacattacctccgacaacctgcagaccattgatgccgatgggcatggacgagttcgcaggcgcggccagggcgtcgttcttcaacacaaccttcgagacaccggtagtgatgtcgacgcggaatatggatcccaaccgcgcgtccgcgatcaggagaatatgcggctgcgacggcattgaggccatgccgtttagcatatcggcgtccgggatgtgcgcgacggtctggatggtggggtttgtggcattcttgctaaagtcgacagtgtagatggtttcgttgtcgtagtggtatgagccccggactccgcctacgacggcatacttgtcgtggccgacggctgcaatgccggttagagctgtggcgccggggagcgcggcgactagctcggcttggggattgcgggcgagcgggttgattgtgtagagatgggcttcgtagaatgttgtgaggaggagatggccgttgggccggagctggctgttttcgatgttgattgagctggtgaagttgaatagttgggttgtcaattgggcggctgtggcgctggccaccatggccaggctcaatgtaggattgaaacgcatggtacagaataatttagagaaattataggaatgggatttcaactaacaaagaggggtttttatctacattgttgtggaaggactttagctctgagggatcaagtgggttcggcacggagcgcagaagtggtacgagtcggagatgacaagagatcgacgaagtagccaagacgggaaattgtccatttgaggctttaacaggaaatcagcaccgagctatggaaaaattatgttttggattaatgaggtgataatgggtgtggataatgacgctgtgtcttttctaacattcactactatgcaatgtcctagttctagagaccattgttttcgttcgactatgttcgagtatgtttttagctgccctacagaccactgaatatagcgcattgaggggagaataactagctacctgttgtggaactacggagctacggagttgaccttcaacattttgaaaagtataagaacaagccacacttctgttgaatttcccgctcaatgcggagtagacaaatacaacactgtaatccacacgatagactaaccaaactgacttgtagtccgttaaatgtcatcttatgtactccgtgctccggcacttgtactaactcgggcgagcatccgattctcggccgatctagtcccagataataaatatgaagtctcgtgtgaaacttcataatctggtaaatcaggactagaaatatcatcaacccattgccttatgcataatcgggttggcgccggcactacccagtggagaacctgtatgggaggcatcaaggtcattgttggcaatgctttccacctctgcatccgactcgtcggtgtcgtcgcatcctgctatctaagagtccttatatataggctcagaggatggttttccttcatgatttgctaacaaccatcgaaaaatctctaacgaggcttcacgtaatgtatcctgcgttaaagaaggaggagtatttaactgagaaaagctggagttcatcggtgacacgttagactgatctgggtatggaatggtgggattatgaagccgaaaccctctcaagataggccagagtgtgcctcgagtatttcttatgtttttatgtccgtaaagcacagttcttctcctttgtttgccctatcgggggccagggcgaaaatgagagactattgtagtgcagcccatcatcctccgtgacaggaagacataagagtctccagacattggctcttttgattgcatattccctaaactcgtcacaagcaaaatatggacctgatcctgcaaagtccataaaattctgtgcggaggatgtccacggaaacccactcggatctagaggaggcgttccacttttagcaaggtaaataacctttggaacaagtccactcagtgcagctcctactcaaagagcagaaaggctcggacggcgtattccgcacatcaaagtgatcaattcaactagggacctggtgcctctgctagttccgatctcgttggcaattcttccacaaccggatgcagccaagaactaacaaggttgcagggaaccccaggctcccaaaatgatccggaaagacttgacatcacgacgctagggttgcagcttagggccatataataggcaagatcatcaccaagggcaatatattcgttccccaatgccttatccgaaatgaattctaccctgccaagtacaatggttggagatggcaactcaatcctgcgtttgtaatgttgattcgtcggaaatgtcaacgctgctgcaaaagcgccaaaaaattgatctccaagaccatgcagtaggcaaaactcagacagggccatcaaggcctctccagaggaaagtggaaaacaatcggcgaattctggcgcagaagtccctatgccttgccatagaatttcgaatagttcatcctcgcctaagtcaatagaccaaggtgccaggtagacattatcgtttcttttggtcaagaccgctttccatccatgcttgggggcttgtatagccatccaccatcgagcaacgttgctttcggcttccccgatgtgaacttcaattggtggtgcacgctttacctcgtctctatccaccccatcgaccgcgcgagggtttgccgttgagctagtgtaaacaagctcggctccatcgtgcttttgaagttccaacaaacgggcggaaagaatataggaccaagcaagtgtgaggatacaatatagtttgaagaatatggcttagaagttcgccagtgatggaaggtgtctccggaaactgacaggtgattggctgaagctgctcgttgtttgagggcattgcgtagaggaggtacgtgagaattcgcaatattcggaatggtaaggctaaaggtaatgtacatgagttaacgaaatgttcgcaagaaatatgtcttcggatgttgtttaagtgatattgttctccttatcccttgcttggcagcatgcgtactatggtaaccggtttgacacagtattattttcaatttcaatttaacaaaattatgtttttggtcttcaacaaccaaaaagagtgtagtcaaatcaaaatactaaacatgatgagaagagaagagagaggagttgccctggtgcccggccatgcgtgaccaagcaagaacaaacaaagcaaacaataatacgctaattttattccacagctaattgcctatttaggcagggggtgtctcagatttcctttttcggtaggactcaggggtctagaccagcgtgttcaagctctttttgtggggagctatgtaatgtgataggctcccccacaaaagttcaatagactcttagaaaagagtatcccgcaaaacacaacatacgtgaccaaattatcccgcaactcatgccgtaaaatatgaccggtctatatcggattcatatccgtgtcaaataaaagctagcatcatgtaagagatttaatagtgcgcagataacatgctcaggttacggtatagcctccgtcaacgcggagatccgccccagtgacgtacttggaggcatcgctgagcaggaaggtcacagcacccatcaggtcctccggtgtacccatcttgccggcaggaatgagggagatccactggtcgcgaagcttggggttctcctcgaggatcttgcgagttctgaatgacgaagaaagacatcagcaacaatttcttccggaggtctgctcaaatgtatctcgtcgtccatgtaagagttactcacagagcagtgagcatatagccagggctaatgcagttaacacggatattatgactggcccactccacagcgagcgaagcagcaaggtggcgtacagcagccttcgcggcgttgtacggagcctggggctggggaacattaacgatagcgccggacatggagccgatcatgacgatgctcccgggcgccttccgctccatcaggtgcttagcaacattaatggcgaaaaggtatgtgccgtcgacattgacaccccacagcttctgcatacggtcgaaggggtagttgatggcctcgaagttctcggtgaagccggccgacgtgaccaggttatcgatcttgctgtgcttggccaggacttcggccatcgcattgctcacagagtcggggttagcgacgtcggcataatgggcggtgaccttgggcatactgtttggaattagccactgcggcgagctggaatggtatgataataaactgactcttccacaccgggattctccttgtggaactgctcgatcaatgaggcaactgcggcctcggcttcgtcctctggggtatgtgttaggataagtcgcttgttccggttatctgtagtggtcgtaggaacttactattaagatcaatgatggccaaatccgagccggaagcaacgaggccttggcccatgactagacccaagccacgagcaccaccagtcaccacgctgactttcttctcaagtgagaactgggccaaagtacgcttgaaatgcatgccaccgcgtccctgagccacgggctgagtgggcatctcgttgtcgggagggtattcgatttgtacgctttcatcagtgcgagcaaatctgccctccttatcactagcagcaccctcgggagccttatttgtagcagagaggatggggtcttttgcagggtcatcgctcttcttctttcccagtgaggcggtgtatgagagaggacgtgtgaggcccatcgctggacgggcggctgctaatacaggacgggcggccttgatggcatcgcgtgcgactgccggcttgaacattttgaaggttatagctccaatgcacaatagagctgtagaggtatacggttgggggggacgcgacgtataatgtacgggagaataatgttggggaggaaaaacggtctagacatccaggggaaggtggacgtatcaaacaaagcaggtcatcaggtcatcaggtcatcggacctcatttgcattttatttttctcagagcccaagggctaagaattgagacacttgcggtgaaaaaaagccaaaggatatcggagggctattgactgcctattttagtctcaagctttgttttatttgtttatttactccaattgtagctctaaagaatatagaaagctagatgggagactatgatgtcaccaatttagtacttttgtttactattattattcaagtactacgtatgctctctaatgttattctcattcaaatcccttagaacttgatcataacgatggaagagctacacggacttttgcctatttgctaaaaccagtcagtttcgtttcggccgcattttaccgcacgccaatgaagtgcttggatgcagctttcggattatcatctgatatacgtagggtgcagctttttctctcactatcctccgagcctaaaatgttgttttcgattctctgtaattgtaaggcgaaatcgaaattgatagtgtgaactccatatttgtgttaattttgggaggtatccccatgctgaaacttgtacctctataacaaaagtctcgctctattcggattcggcgaattccaccagcggtgttccgcttttgcattgatcctgcaaggcacatgttggtcagctgttctcgagtcacatttctctgggggttttggagttcaagggggtgaattaaaaacgctaaacatattcaaacgaaacaaaaaagatgtcatgggggtccaggaaagtccaggaaagtctggtcaggggaaaggcgcatgacttactcctcttttgtgcacgacccgtgcaatggttccccgttggggactgcgaatcaccgtctccatcttcatgctctcgatgacaaccaacggctggtctttctccaccacatctcccgcctgcacctccacccgcagcactttacacggcatcggggccaggacgctgtttgtcacatccttcagtcccaatgccttctccatccacttagcccggggcaccgtgagtcggtactgagtcccacgctggaatgcgataatagtatcctcgtctcgaattactgttgtatctaaccgggtgtgcgggaaaaacgacgtgacaatgtgcgacgctggatccatgtggctcaccacctgctcgaaaactcgtccgccaacctccacgttgaatgtgtcatctgctgtctgctgtactcgcacactgaacgtggagccgtcggtagaccctgggccgccggtctcggtaaatgacaactgtcgctcttggtaactaggagtgaacccgaccgttgagcctgcaacccctgctgaggatcgtgcccctgacgtggcgtcgcgatgtagacatgccaatgcgacttgcgccagcacttcctcctcggtggtctttgggggaaagagctcgtcacggtgcttctcaatgtagccggtctcgacctcaccagcgatgaaatccgggctcttgcagatggcttttaggaactctatgttggtcacgggtcccgcgatctcatattcttccaaagcagcagctagcttgcggagagcctcctcacgggtttcaccgcgcacgataagcttggagatcatgggatcatagtgggccgagacatcgtctccttccacaaatcctgcgtcaatgcggatgtccttcgaagtagccggcgttcgcacatggagtaaacgccccgagtcagggataaatccctgttctgggttttcggcgtagattcgggcctcgatgccatggccactcttggcgatacgctcttccacttcttcttgcgtaaggggcagcttggctccttcagccaccagaatctgccagtggacaagatcctctccagtgaccatttcagtcacgggatgctcaacctggagacgggtgttcatttccataaaatagaaatcccccgagtcattatcaaaaatgaactccactgtaccggcaccttcgtagccgacagcctctgcagctgaccgtgcctttgcccagaggtcctttctagttgcatcagggagatgaggcgccggagattcctctagaaccttctggtgcctccgttgaatactgcaatctcgctctcctagtgcaacggagttaccatgcttgtcggcaaatacctgtacttcaatgtgccgcggtgtggtgatatacttctccaccagcacattatcatctccaaacgagctcatggcctctgacttagccgactcaagctgagcttgaaacaccgctttggaactggcgatacgcatgccctttccaccacctcctttgacggctttgatgagcactggatacgtgatcttgtccgcctgctcctcgagaaacgcagggtcttgattttggccatgatagcctgggacgcatggtacaccagcagctgtcataatctctttggaacgactggtaggacacgcctggtaagcatagtgaatattcaaataatgcaatgagcgtacctcttatcacccatatcctcaatggccttatacggtgggccgatgaagaccaacccggcctcggtacatttttgcgcaaatgcagagttctcactcaactgcataacaagctcaagttagtattccatctagaatgtaaatatgcacagccgacttacaaagccatagccagggtggatcgcttgacacccttctctctttgcaatctcaataattctatcaccatcgaggtacgccgaaaccgagcccaaattaaaggcgaagggggagctcaaggcatgttgtgatcggctgtccgggtcggtgtagagtgttgttacgcggatcccacgttccgcggcagtgcgtccaactcgtctagcatatcgaagttagcaccagaaattgcacatgattcagtgcccaacatacaaggcaatttctcctcgattggctataagaattgaatctaacgatttgattgtatttggtgtgttagtggtcgatgatacagctcgcgatgttccgcgagtcgcggtcggggttaagcggggaacaatgcggagaagggatgagagggtcatgacgatgggagaacagccttttcagctgtaataaggccttttcagagcgtaattcaaatcacaatgtaagcataatcaaggtgctttgaagggacaaagtagagaatgggaaaatgtcaaggatttggagaagctcctgttgagccgatgcaaagcgagattgcggggaaagccgagggtataacataatcagccgtattgggagatgcatggatggtcacgaggcctcgtgggtcttccacccagtactagtactagtagatatctgaaaaggtccttcatagctgatcgagtgaataaaaaacaccgtagctgctcatcaagtgaagaaagagtgatactaccatattgttgactaccccatggggaaactggggattccggggtggatcacgtgagactcatatacccgctgggtattggaaaatacccctccgtaccttctcccagttctcctcattactcccggcttcaacattacgcttcacccttgtcaaatggttcctccgaacagtgattttatcttatggtttagtggacttcctatctcggctcccgtggtgccaactaacaagttccacgcttcaaattatctatcgagccaaatctcccaaacttggtaaagtgaaaatatgactgcgataagccttccgattacatatcgggagatacaaccttaaaaccttggaataacggcggcaaatctatctcttatcctataagggtatggaataaagcaagcccacgaggcgaccttgattgccagctcataccttgtaatcatggtgatatgtcccggacagaccttcccagataggaatggtgcctgttaactacatataggtatgttgtgcgaatacgatgatgcgtttccctcccttctgtttatcctatgttattcagggaccgctggggaacccagacagtcgaatcacggtcgctttacaggataaggtcaaaattatataacatctgttaagcttgtattcatgctgtcaggtatatagtaattatattaactttgcgccactgcgaaggcctaacctagagcttattgatgcaatgtagcaatatacatcagtatcagccaaaatgatgagataaaattgcggcagttcgaagaaaaagaactaccactacagaatagtgggtttcagctgtattttgctaagcgtcgtggcttaaaagattttgctgactcctctccctcgatcttgggcttcaaactcagccccgccatcctttaaccacatcgcatctcccctgcagattgtttgcttgcaaaacatcattttcgggaaagcccagtatccactggatcataaatcttcaaaaatggaagacccagaccggaaaatgggtaaaagtacaaagatgaccaacaaactggcggcgaagctagcgaaatggagaaagaaggagaaacccgatagaacacgtggaggtgcccttgtcgtctctccgaccgcagagtcaaacacgtccgagccttctatggtaaactatgtacagccttcagatggccttactggaaatcccgacaagctctccaaacctgctttggtgacttccaataccatgccggtctcaagtcttttcgagcccctctcgctggaaacgaccgacgtgcagcccgaaaatttcatacccggtccatcatcttctcctacgaccgaagacacctgggcccgggcatataaactcttgcaggctcgagagcccgagttggtaaaagattatcagactcatttgagcctagcgcaacccgagaactcagagcacataaatctctcaaatccacactcagttgagcgggtgataaagcagctgctggaagttcgggaccagaagcagtggcgagtctcactagtgggaaaggaggtgaagatacgagagcaagccgaaaaactagttaagtttctcctctgggccgaaccagccgtgaagaaagccgttagcacccagccatatgcagcattggcgtgggctggcgtttcgctgctcttacctgtaagccaagcaatcctcctattatctagccaaggctgacccagacagcttctcacaagcagtaccactagcaatcttgcgatgcttgaaggcttcgattccattgatcatgttcagatctactgggatatctgcgagaagacatacttgcagtccaaggatggggaagagtatcaagctctcatccaaccccttgctaaggtctactcttttatactcgaataccaagcacgtgctatctgtcatttctcaaaagctcaagtctctcgcgcatgggagaacatgacgggtgaaagcaattggggaaaaataagattaacaatcgaacaattgagcgataactgtaggagctatgtctcccccctcaaacttggggaggttcgccgtcatcgagatcgtcaattactggagattaaagagtctcgggttattcttgatggcattttggatgtcctaaaagcggacacgagtcggaaccagaagaattataaagaccagaacgagcgagggtttcttcaagcacttgcgtccgactacgaggatggcaagaattataacccactgagaatcccagggacatgcgattggttcttacagggtgacgtacttcgaaactggcgggataacgaccgctccagtcttctgtggatttccgctgggcctggctgtggaaagtcggtgttgtcacgggctctcattgacgagaatcggctttctacgaatatttcgacatctactgtctgctatttctttttcaaagatggggatgagcgccgcgtgtcagccactgatgctttgtgcgcattgcttcaccaacttttcacccacgattcgacgggcacactgatccaaaatgcaatgcccagccacaaaaatcacggcccaaatctagtacagaacttctctgagctgtggcgtctgttcatccaatgcgtcagctcgccagaggttggagagatagtttgtgtccttgatgccctggatgaatgcaatgatcatagcagtcggcaattgatccgcaaactaagggagctttactccgagccccaagtttcatctttaacctcgaaactgaagtttctgatcactggtcgcccttatgatcacctggaggcatcgttccaagatttccctgatacaacaacttgtgtgcgcttggacggagatgaaaagaccgccgaaatcagcaacgatatagatctggtcatcgatgctagactacaaaacctcgcccaaaacctcctagagagcgaccgtcaaatgatttcagatcaactcaagagcatggagaatcgtacttacctctggctacatctcactttcgatattattgagcatagccggagtgagtatggtcgactgtccgatatgaaagaactattctctgggctgccttctaaggtctcagaagcgtatgagaagattctggatcggagcggggaaaagctccagacagaaaatctccttcaaattgtcttagctgcatcacgacctctatcacttgacgaagccaacatagccttaacgatggctttgagaaagggcacttttagttcttacgacgatctccagaaagattcttggccgagagataacttcaaaggcgttgtggaaaatctttgcggtctcttcatcaatgtgtacgattctaagttgttttttatccatcagacagccagagattttctcatcaaccctcctcggagtggaaagtggaaggggcggctgagtatgcaacattcacacgcgaacatggcgctgttgtgtctatcattcttgtcgtttctagatgggcaatcatcagtggagcaaatcgaggcaaagtttccgttggcgcggtactcggcccagcattggatggatcatgcacggcctgcggagacagagaacgaagtccagaaaagcgtcatggagtttttccttcaagaaaatcaagcttggggtgagctctttgagtcgatttattaccggcggtcatatggacgaccccacatcctggcaactccactatactacgcatcgtccttcggtctccaacaaacagcacaactcctattggctaaaggcgcggatgtcaacgcgcagattgacaattatggaagtgcactccaggcggcttctgatagaggttacatagagattgtggagctactgttagcccatggcgcggaaatcaacgcacagggtggcatttacggaaatgcactcgaggcggcttcctctggcggccataaagagatcatggggctactattagccaatggcgcgggggtcaatacgcagggctcttatggaagcgcactccaggcggcttccgttagtggtcatacagagattgcggagctgctattagccaatggtgcggagaccaatacgcagggcggcttttatgggagcgtactccaggcggcttccgttaatggtcatacagagattgcggagctgctattagccaatggtgcggatatcaggacgcagggtggcttatatggaggtgcactccaggcggcttcctctaatggtcataaagagatggtcgagctgctattagccaatggcgcggagatcgatgtcaacgctcagggcggcttagatggaaatgcactccaggcggcctccgctaatggtcataaagagattgtggagctgctattagctcatggcgcagagattaatacacagggtggcttttatggaagtgcactccaggcggcttctgcttgcggtcacaaagaggtcgtggagcttctattagctaagggcgcggagatcaacgcgcagggaggcttatatggaagttcattccaggcggcttccgcttgcggtcacaaagaggttgtggagctactattagccaagggcgcggagatcaacgcgtagagcagcaattatggaagtgcactttgttgaaatccatactggctttccaatacgtacggcggttcaatggcatatatattcctctcacttcttgtattatttggatctgccacattgaatgtagcgaggtttccaatgaaagccttcatgttgatttcgtctagcaatatgtgttggtgaagatatgggatatgggggttgttacagggacccctccctgcctgatttttcagtattcggcttaccgacctccacaccgactttgtgtcgaactccggtagatacctacagcatgtatataaaccactaacaaaactaagtcacttttatcacatcgtcaacaactaaactgcttcaaaaactactccaaaaactaccccaaaaactgctctagcatcatcaagggattaaaaaatgtaggcatgagataatatacacgttttttctgatcagaatgtagggttttttgacaaaagtgcagaatcaagtctagcaaaattgatggttgattagtaagacaggatactgaaaaatcagacaggaggccgaattagcaatggggtccttgtaacaatccccaagatattctactttgtgtaagcttggttctgaagcagatagggaaaactgaccgtgtctaagttgtcaacctagaagaggatacggaactctcatcatcggacgaggtacgaaggcgacatagacttatgtactgagcctcagtgctttcacctccgctttatacgctgcatgaacgatcgcaatccctcgtgttcgagccacaggctctagctgggctattgcggacatctacatagctctccttttatagatatggcggtatatatataatctgttcagcagaaatccgaatagtcctagtggtcgaggccattacattcaagacaaagggtaacgccaaggacctttatcgagaacagtacacgtctataggtctctatgctaggtgtattggaaaataccaaacaccatacctctctactttctttatcttacccccacgcttcaacctcatcaaactatggggtattagtagtctcggctcccgtccgtgatacaccaactgacgagtcttgggcttccaacttatctgccaagctaaccttaagcagatagaccaaaaggaagactgcgataagcatttagatcatattcgggagatataaagatcagtcgatctatctctcgtcctgcagggttgtggaatggtagtatagccacagctcacgggggcaatctcgattgccagctcatgccttagaaaggacagcaagcattcaaacttggacatgcggtcctataatgttaatgtgatctcggtgacaatcccgatgatatgccccggacagaccttcctggataggaataccttatctgggctgtagcgcattgcccatgtgagtcaatctaagccgagacgagtactttgcaactataactttagtttcaccgactattaaagaaagtgcttgggttcaatcatgtctttcacgctcgtagaccataattcttgtttttaaatttgaaacctaacagtaatttcaattaccttgtttgggttccggctatttcgtcaacatattatgcccatgatgaatcctttcagcgtgctgaagcaatatatctggaactcttcccaaacccccgtcaaggacatcaaggaagaggtattcgatccgaaagtatgtacatctagagaaatatcgacgcttaaccgaaagaccacctctaagttctcatcaaacaggtgcacctcaactacaccccaccttcaaaaagatttacaatgcaagaattgcttttaagccagagcccaaccgcatcgccaattgcaggaacagttccattcccattattgtctgccgagggtgtcaaagcctaccggagagcgctattccaaaagaatgtcatagacaaatgtgccagctcgccatttccggggactttagtcctccgcgacgcggtgaaacagtcaaagtttgtcaatgacttttggaggcaccccgagacaatgaggattgtgtctgaagcagtcggtgtacctctggaggtggtgatgccaacggaaatagggcacactaatatccaagttgaaggcactaccattgcagaaatggccagtaatctcaaagctgagccggcggtagaaaaactcgagttgagtctcgaagaccgaacttacgaccctttgaaagatgcaagtgccatcattccgtggcagtaagttcataccctggccgccttgcttgtagcactgacgagactaactggctcaaagctatgactcgtatccttacgtttgtgtattgatgctgagcgacactgagggtatgatcggaggcgagacatatatcaagaagggagacggggaagtacagaaggtgtgtaagaaatatacttactgaaactaaaattcctctgctaaccaagccattgaaggttgagggcccccaaattgggcatgctgtcatgcttcaaggcggcgaagtctgtcatctggctgcccgggcgaaaggcgtcaaggagcgcatatcgactattacttcataccgttctacaatgccaaacgtttacgactccagctatattaccaacgtccgcccttatgcggatacaacctctctctatcctgaatggacacaataccgcttgcgaaaattaagggacgagctcacccattatcttgacgagatggagaaagacgaagagcctgccaaagagagaaaggatatacaaagccttatagaccagcagattgattatttacgacgaacctctcgacagatggttgaacctgagtatactcagcgagttttgagaaactatggcaggccgtcatactacgatgcacctagaatctgggagactgttcaatcactaccgggatttgagagacttgcatcagcggcggacgaggaacgacgttggcagcctgagagtatctattggaaagacctcatgagatccacggaaacaattcgcttagggaaaccccttcagagttctcttgggactgctgtgcgggagaagacaagaaagtactatatgggagatgaacttctgcgacaaggactcaatgaggcgttcttggattggttgggatactcaggtatttgggaactttactgcaacatttgattggaagacatcacgagatccgaaatttatgactacgactagttattacattacacaaatatattcgaacaagacacatctcctattgcacgccaagataaggatcagtcgtatgaagattgtctgtctgtagtacatagtatactgcaatatctgcaatacatcaagaatcaaaatgatattcgtaatttgattgtgttgggtcactggacagcccagaagagaggtgccatgccctcccccggcctgtccagcaacaactatataaataagcccttgagttagccactgaacagtccgaaagagaggtgccatgccctccctcggactacccagcaacaccaccctccatacattgaagttcagtttccatcatccaatacaacaagtataactcaatattcatctcctccgacatcaattcgaggcctcgttaaaaccagctggaagaaaaccccgtgggataaatacaaccagctggaaagagtgcctcgtacatatattgaatccaatttccgctcgtttcctttgttttcccttgaatttcctcccttgttttgttgtctttcgatatcgttttttttttaatttttgatttttgattgaatggattgcccaaagtcgtttggtttgttggttgtgccggttgttcgttggtttttgtcgattttggatatttatgttggcggtatgatattggtgttgatattgatatggttgatattgttttcggtgttgttgatattcaaatgattgtccgattggatgtttttctttcgtccgatgggcagttgagtccttctgtttgactcattgggtggtatgggttgccatgcccgttctcttcttcggagtcggttcaatggtaaaatggtggcatggcaacccatacaaatcttcttattcggggttcgttcgatgaatgggcaatcaattgagtccttttgttcctcgggactcatcgggtggcacggttgccacgcccattttcttcttcaggttcgaccggtgcgatttccaacatttttttacatttccagacggcagtgtcgagacattgtcaagagattgtcttgagctgtcgtagagctgaggcctcatcaaaaccaaccaggagaaaaacccgcatggggaaagcttcctagctggaaagagtgcctcaagtggttgtgtattgtagtaacaatttggtgtcaatgacaccgtggtgaatgcccaaccgggagaaaaccacgtgggaaaagctcccggttgaacgtgaagtgttcaccaagaatgttcaatatagttgcccgtcctatgggaaaaaccgccgatatggatggggatgagagagacttctatggacgttcaatgaaccagttccacacgatgtccacttcagctgcgggattttttctatacattaaagtctcaaaaatagaaatagtatcagtcaccaggagatttttagagcccaagttatctgtcccaaatgaggaccacaggcgccgcagtcctcacccagtacatcaacccgggtatcaagaatgcgaatgctcgatgtttggatagagacccgggccctagatctctccccaaacacggcaaagatgagagagagttagaatccaagttatcagccaccagcaaagaccacaggcgccgcagtcttcgctgaggacatcaaacccagatattgcaagttgcggatgcttagcacttgaataaaggctagggcccttaacccctacccaagcactaaggtgacgaggctttcaaaattcaaagcacacaggtagtttctcccagaataattcagtggatttgttaaattcaatgctcttcaacaggtgggagtcccaactgggacgaataacggggggcccgtcgtagcacaccgtgtgggatggttgtagaagaaaagaaaaaaagcagaggggagaggggaaggactgatatatatagcttagtgtgacgtaaacctcgatagtgtccgatatccaatcaagtaatcgacgtacgtcctgtgaaatgaaagtttagatgtccggtccgcatgagggaagtgtatatcgtacaaagacatagtacttctggtccattgaatgggctagtacatttgagaatatcacctgaacacttgcgacaccgtaaatggaaagcggacgaagttatttgatgactgaatcctaaaaatcacttgcatttttggtataatagctggccgctgttgtatacagaacggaaggcgaagtcaaaagtgcatacagaccacactgccatctcatgtgagaaaagctaaagaaaacccaaaagcaagtctagaacgaaacaaaaacaaagaagagaagcatgtctttacgaaaagctgcattgatgccttgtttccaggccgtgaactgcctgtgacgatcagggcacttgcccttcctgatcttcgactgccgtgctcgtactcactgaaataggaaggaacaatgggacagagtcgttccttcgcgattcagtaagcgaggtcacataaaacccagtcgcgagaacgcgcacgtagttttccttgttctttcttcctctgtacttagaattctgaatccaatgcaatcttttcccttggattgaattggcatgtcacactgccctactctcttagattacgtatttagcagagtccatatcctctactctacacatatttcaaggggattgttacagctcattgctgactcgaccccattagcaagacggtagatacctacaatttgtatataaaccactgacaaaattaagtcactttatcatatcaactacttcatcgtcaacaactttttcaacaactgttctatcatcatcaagggaaacatgtaggtatgagataaagtacacgttttttctgatcaaattgcagggttttcataactatctggtagatttaaagtgatgccttctatgtaggatagaataaggcagaatcaggcagagggtcgaattagcaatgagggaattccctgtaactaacaatcccctatttcaatactcattgaacaaaaaccactttctccgtcttcgtcgtcttctacgtattcaagactctccctctcaaagacagaacgcaacacagagcctatgttgtatagggtaaatgcgatgtagatctggagaaacgccaaggcttatgttagcaggattgctatctccttcaatgcacgatcagttcgatcttccctccatcacgtcagccgtgcatcctcgttttgcgtgtgctctacatatctgtacttgacttacgttcgttgaagtcttgtcattcatttaaccagcgccccctcgaaaccctcgccactcgatccccttcaactttttttccggtatccactacgagatgtccgacgacgatgagtactatgaatttgaggacgaatacatgtacgaggatttagtcccagacatggtcgtaagttcaatctaaaacacctcgtccgactctgccatcagtgctgcgcgagaaaaacagcgtcaattcagaccttaaccaaaaatttgcttatctaggacgacctcgccgcttcctcacactacgaagccgcgctatatgaagacccagggatcgacgtcgaagaatacttcagtgactgggactattattcagacgattaccacgatgatgacgcaacggtcgaacaaagcgcagagagaaagaaaagaaccgagatcgcagcgacaacatcacgacgaacgaagacaccttcccgcccaaaaggccacatcgcccgaatcccgccgacgaaatccaccctgatgccggatgtcgcctccttccagggcgtggtgtggaaaacacccgcgctggaccgggaccaggatgtcgccattttgtacgaaccggacacgggcgagaaagtcgcgcttctagagaactggcgggaagtcttcaaattttcccagccggcactggataggtcgcggttgaaagggcgacacgtggttgaatctaagcccgtcgattcgtcgctagctgacgatgaatctgatggcgcggacgacgagtctgatagcgaggacgagatgtcggatgatgtctcgtcgaatgcctcgggtgttgatgatggggatgctggggatgcgtcgaatacaacttcggacccggacccggactctttccgctcgctgaaactgtcttcgccgccgaaggtcgtgattccgttgaagagggggtggaagcggaaggcggttgcgctgaaggatgacactgacgatcaatcggcgttgcctccacagaagagggttgaggtgcggaagggcggtgatgacagggctacaaagtgtggtgcgacaccgccgatacgcaggtcgaccaggcagaagaactaggacggtcatgttaataatttcggatgtatggctatttacaacatgtacaataaatgaaatgaatctgcatatagtcttctaaagagatggcattgcccaaatgataatttgtgtataattctcttgcttaagcatactccttgttgaatgcgcggccaatgaccattctgcggatctcgcttgtaccagcgccaatctcatacagcttcgcatcccggagaaggcgcccagcaggaatctcgttgatatagccggttcctcccatgagttggatggcatcgagcgtgcattcagtcgcacgttcggcggcgtagaggattgcaccggcgcagtcatgagtgcgcacggccatctcgctaggttccacggcggcgttgtctacctgccgtgccgtggcatatgtgtacgcacgcgaggcagccagcttagtgtacatgtccgctagcttgccctggaccagctggttgtgggcgatcggtgcaccgaattgcttgcgcacgtgtgtgtaaggaaggacgaggtcaagcgcagcttgcatgattctggggagtgttagaatacgagagttgtgctggggtattggatggctcaccctaatggtcctgcactcaggacgagtcgctccaagtccagaccctccatcaagacgcggacaccgcgatttaactcacccaggacgttctcccggggaacgaaaacatcctcaaagatgagttcgcctgtgttagagccacgcatacccaacttgtctagcttgcgtgcgcatgagaagcccttgaaggtcttctcaactatgaatgctgtgatacctttggagcctagttcaggcgctgtcttagcgtacacgacaatgtaatcggcatcggggccctgtaagaaggtgtgagcaatgtgatcggaacttcgaagcccctctatatccccaaattacttacgttcgtaatccacatcttagttccattcaagagccagcctccatcaacttccttcgccgtggtcttcatgctgactacatcggagccagctgaatgctccgacatggcaagagcaccgaccttctcgcctgataggagaccgggaagaatgcgctctttttgttccgtcgagccattgagggagagctggttcacacagagctgggagtgggcggcataagagagaccgatgcttccttttatccagaatcgaggtcagatcaatgttcccctcagccatatactggaagacataccggatgctcgactgatctcctccatcaccacgcagtgtgcctggtagcccatacccaggccaccgtactcctcgtccgctgtgacaccgaggaaccttgatatatgttagtatgcgctgtataacacactcccttcacaaagaagagagtcaaccatttgagagaaccatacccagcatcacccatcttcttccacatttccgctgggaactcattctgttcatctgtccgtgcagcaacatcggctgggatctcacgccctacagcaaggttagaagtgcgacttgggttagagcatagataatgtacttgtgaaatcttgcacgcgctcccgcagctctaggagatcactctcggacggaggtacaaagcccgtggggtgttttgttgagatagagcggaaatacggggtaagtgcggggatgcgggttagccgtaccgcgcgtgttgaggtgcgaaggagagggagggttagggacgccatggttatatgagaaaatgtagaatgcaaattccggggaagaagtgtctttggggaagtggaccttttaaagatgtgtgtgcaagggggatcggtagttcctcggcgcattcaggctcagacacttgttatactatgagtttcccaccttgtaacgagtgatgcttttggatttcagatactagaacctctctataagctccttgatttcaaactaattcgttcttctattctatgctctctctccctcaccaattgctcagcatctttctgttgtttctcagcattctcatggccctcgggtatatgcggcaattgtcgcatctccgcatttgaggcgaccccagctttgtggcccgctttgtgccttttcgcttctctcctgctgtttcctgttcgtatgtctttgaatactccggggaactcctaatatacctataattccctcttcagtttgacttgggctgagctctgccatcctcttctcagaatcagctactccacacttttccccgcaatgcgtgtcccgtccccgctcgtcctccaaacctggggttgccgactcggaccacggaaatgtctcaactcattccgccagtcaacaaacattacacgaccagcttatagaacagtagcaagttatacacatcctcaccatgcctcagccctctcagtcctccccacagcagtggacacctcctcacaggagtaccgcgaaaacagcgaacaaatgcaaaaactcctcgaccagatgaacagtctacacacaaaaattgcacgcggaggaaatgacaaagcgcgcgagaagcacatcgcccgcggcaaaatgctcccaagagaccggatctccgccctagtcgacccaggcacctccttcctagagctatccgcactcgcgggacacggtgtctacagcgaggatgttccagcgggcgggatcatcaccggaattgggatggtcgagggtgtcaactgcatgatcgttgctaacgacagcaccgtcaagggcggcacctactaccccgtcacagtgaagaagcacctccgcgcacaggcgattgcgcaggagaaccgcctcccctgtatttacctcgttgactctggtggtgcaaacctgcctcatcaggcagatgtgttcccagaccgcgatcacttcggccggatcttcttcaaccaggcccgcatgagcgccctcggtatcccacagctctccgttgtcatgggtccctgcacggccggtggtgcatacgtgcctgccatgagcgacgagaccatcatcgtcgagaaccagggtactatcttcctagcaggcccgcctctcgtcaaggccgcgacgggcgaggaggtttccgccgaggacctgggtggcggtcagctgcattcgagcatctccggtgttaccgactacctggctgtcgacgatgcccacgctctagtccttgctcgccgctccgtcgcgaacctcaactaccctatcacgcccactccgctccggctggaaaacggcaatggagattcgcatgtcgtgaaagaaccgctatacgaccctaatgagctaaacggaatcgttggcaccaatctccgacgccagatccctgtccacgaggtcatcgcgcggattgtcgatgggagtgaattcgccgagttcaagcgcgactatggctcgaccctggtaacgggctttgcccgcatccacggccaccgtgtcggcatagttgctaataatggaatcttgttctccgagtcctcgctgaagggagcgcactttattgagctttgcgctcagcggcggatcccgcttgtcttcttgcagaatatctccggttttatggtcggcgctgatgccgagaagggcggcatcgcgaagaacggtgctaagcttgtcactgcggtcgcgtgtgccgatgtccccaagttcactgttgtatttgggtccagtgctggtgctggtaattacgggatgtggtatgtttctttctttctccttaggctttctgtagtagttcttctctaactgatattgctctagtggtcgtgcctactcacctcgtcttctctttatgtggcctaatgcgaagatcggcgttatgggctctgaacaactctcggccgttatggaggctgttggacgaaccgctgatccggctttgaaagaccgcatcgaccgtgaatctgaagcgacgttttcctcggctcgtttgtgggatgatggtatcatcccgccgtctgagacgaggaaaatgctggggttgggtctgacagctgcgctcggtggcaaggctgagccggatgtgcagaccaggtttggtgtcttccggatgtagggttggatcgaggcatggtcatttttattcaaataattcgagaaaatatagaatagaagacatctgtttatgtgccgttaacttgttacgacggttccggatagtcaaatggaatatgcggtggacagtcgctttgtatcaaattatgtagccttggcctctatagactatcgttctttagtctagtggacttctagaattgcacggcgcggtccaaagagcgcatcaaaggaaagtgtttgaatcgcacaagatatccggtactataatttcactcctttatgttgacggcgaagggtccaaccacaaggattgtagcgtgagcctatcaaccaaacgataatagcaacaggaccaaaagaaaagaaagcacttttttccatctcttgaaagtagtctttttagagtccagagcaaccaagcctcaatcaaatatgtcaaataataaaaagaagtatgacaccaattgtgtacagcgcaaaaaaaaaaagaaaaaaagaaaagatacaaatctgtagctgcgaagcatggttctataggggtgaggagaggagaggcatagacatatcggcagcatatagaaagaacatcagtcatacatgacatgtcaaaatgcatagcggcgtcgaataggcatagatcgcagagggtcgtatcgcatgaaaatgaaacaagacaaggggcctcggcgccccttgaattgctaaatcaaaggatgacacacggaccgcggcggtttttcggccggcgattgtctcgcttgcggttcgggccttcgcgctttcggttgggatcgttgctgctctttgcggcctcggagtctttgcggatgatctggcggcacagatcaacgaagacttcgttgacgtttgcgcggcgccgggcagaggtctcgtagtatggtgcgttaccccatttctgggatagaccgaaggcgcgagcgcgtggtacagcgcgatcttcttctaggtcggatttgttgcccacgatcacaattgggacgttctcgtcgtctttgattcggatgatttgttcgcggagctcggagagttcgtttagggaggacatgctcgtgatggagaaaacgaggaggaatccttgaccttgtttcatgtagagctctctatagacaatgttgttagtacggtgtgtttttcttggagttggttcgcagattggtgatggatggagtgtggctagatttacctcattgccgcttgtgggttgttagcttcgatctcacatgggtagatgtgccaaaaacttactgaactgttctgttcctgcggtgtcaagacttcgaaattttagcatcatgccatatccaaaccaccgaggtactcacatctccagtatacattgtcgaccctatcgagcatggttaacggccgagtgatttccagcgcgtagtagacaacttacgtccacctcaatctgtttccggtatgaatcctcgatcgtagggtcgtagctttcaatccagacattttgaacgaattgggctagaaggcgattgttgctcagcttgaggactcagggcagggtgcggaacacagggaacgaacctgttagacaactttttccaacacctcctgttatcgcgtcgcatgggaatgcctgtggtcagcctatgacctatggaaacatctcaggaggaaaggctcctaccagcacccaacacaacaatgtggtattcgcgtctaagcgcaaacaaacaattagaattggatctagggacattcaaggagtatcatggagtatcatggactcactgtggccgcattgagaaaagtgtgtatcgatatttagtgattcggaatggaaatcgaaacagctctcgaggacgaaggtcaggctcaaggtggatcccacgtggtatagatggcgatctcaaatcgtagaacagttggctatgagaaattggcccataaaccacgttgaatgcttcaattgtattgtgtagctcccttgggggtggaagagctcaggagggcggtacgcgggtgtggttacatggcccgcctttgcgtagacgggggatatggagattcgagtggttcgagggattggagggtccactggagaaatatcaagacatataaagtaaggtaaaggtatttaggcgtttctgcatgaatttttttaggggaggggagaaggtctgataacgggagttatcctaattgcatctcctgtcccttcgacccaatcacaccatatgccgaggtcgtctctggcggtcaggcgctaactgtaagtgtatgtatgctgtcggtcttttcagaatgtttgctcctttcttttggggtcttcttggtcttttttttatcttttctttcccgattgcaactgctatccctgtgaatatggatcacgtgactcccctgatatgccgtcccagggtcatttgtgtttgaagatactcagaatcggtcatttttctaaattttcagattgatacctcatgtttgagaaaggaagagtgtgtggaaatagggcaatgtttctcaattggtcagttttgataggcgggatctcgggggaagcagaaggatgcatcacatacgaccaactactgcaggggaggcccacaaagggactctccccggtttcatgatggaagaaaaaaagaaagattagaaacgcaaacaggtcaacgggtaaacaagttatttggtatagccctcgatgatcttgggaaaagccgcgtacgtcatgtcgtataggatgtacgatctcgggagatttgtggaggggccaacggactggctctgatacattatactccagatgttcgatttgaaatctgttttaaggtacatcgatacatagggctatcactgctgaagcttaaactcgctacaggccactaatatattccccttagcccctcaattaggcactctagcagacggcatttatgaagatagaagtagtatccatagtcatctgcacgatctccaggtgtagatcttctgatcatatcgatatactccttatatcaagccaatagccttggaacaatttactttgtccagcttcataagtggatggatacgtcatgtctatcacgtgatgagcacaggctagccagcctctgtcctctttgccgccgtcttgaccggttgcattctcaccatccctcactccgttctcatcctattagctttctgacttgttttcccacaaacgatacccttataagcaaaaatggcctctttccaggaacgtgcccagcactctattgctcagctcgacaaggaggtacgtttccagccattgttgtgtgtttcgctgtcctcctaggtcaaaccctcgcctggtggctgcaatgcccctaagcgatagtgaccacagcaggagtatctgcaatcacatcctttgatacatacttcactatagtatctatcgctgtggttttgagctaacatctgctatttcgtagctctccaagtaccctgtccttgccaaccttgagcgtcagaccaatgtccccaaggtctatgttatcctcggccttatcggaatctacttcttccttgtcttctttaacattgctggcgagttcctcgtcaactttgccggtttcctgatccccggttactactcccttaacgcacttttcacctcaagcactcaggatgacacccaggtgagttttttttttgtaaatttccccctttacacacaaattactaaccttgtcttttttcgctcctctagtggctcacggtatgttcacatgattttatcacctggttgttacaatcgtgcggaagtaatcaccgccgattgttatcatacaccacccacgtgacatatttcccgcttgcacgcgatcagtaattctaacatatgacttgatagtattgggttgtgtttgctttcctgactgtcattgagagtgccatcagcgctgcttactggttccgtacgtgcccacaatatgccgattttctgactatcttgctaactgatcgcagccttctactacatcttcaagttcgttctgatcatgtggatggcccttccccagaccaggtatgttactattccatgaccaagttaagaccagtagctgatctcttttaagcggtgcccaaattgtcttcaactccttcctccagcccgtgcttggccgtttcttcagctccaacggcacttcctccaacctgcgcgctcaggccgaggctgcgagcaagccccactccacttaaaggtgtgtagtctcacatcttaaccgagaatcgcgtcgacaataaaagctccgcggaacctgcttaggcgcaggttgcggatccgattctctgtgcccaagcacaaagtggagtggttggctcaaatgttcgttgtcatgattaaataggggtagtgcaatagctggaacatgaaatagagaggacccgagcaatgttgcaacgggtccgaggttggatattcgctcaatgtgagaatgctatattggttcttgccattttgtcacactcgagtggattagttgttagttcgtacattatgaatgtggatgcagttggtttcatagatgtgttcgagatcgacgttatctacattatctacatgtatcttctcagtgttgccctacgcgccatcgagctgtgtccttacaaagccgtacgagtgaggatgcttgagtatccatggatagatcgaaggcttggagaagaccgtacataactttgtcagtagttgccatccaaaatatacatcttgactccaagaactcaactgatacacacatgtcatgcattagtattatctgcgcactctatcatctaatgacctccttaaaacgtcgtgcacaaccgtccccgcaaatacagggtgaacggatcaaccccaagaagctggtccgatagctgctagtaaatatcaacatcccaatcaaagcaagtgaacttaacaatgacaatttcttcacattgggaatgattgattttgtaaacgcccgttcgaagtcttgtactcttccccgggtcaatatactcaatcaaagcagtttgttatgtattctcaatactcgagccgtcatatctgcttctgttggatcaatgtgatgcttctttggtttgcattggggtattggcacactgcatgaaggggtagttgtatttggggctaaatatcgggtgttgatggatcagatggaatattattggctaagagatagcactttgcttacaatctgcaggcttttatgcaggatgcagctccacagaatgtgttttagaaaatattacttcaaaccaaataccatgacggtctcgttgaagacacgttgtacaccgagatcacaaacctctctggtttatgatgtctcgtgaggactcaacagaaggcctggaataggggtttcatattgatttgaaaaaggatccatatgtactttacgccgcattgtaaaaagaaccagcccagccctttcaagaatccaaaaatacataaacacctaagcactgaactccagatgaccaccacagcacagggggtttgtacactcatagtaataaccctttttataacatctgacagatttcgtaactcgtatcggggtcgatcgcccgcagccatgtttcaccgaaggaaacaaaagcaacgtgtccggttggttgaacaatgatcggagcgggaacgtattagaattgacgatttagaggtatctcgtccaagctcttagttaaacagcatatctcagtaaagccccatgcgatttccccagccatcagcccgcgggttgacgacaatccgatagggaaagggattggaatcgctagtggtgatgggcgggatatggtctttatctcgattgacaacgctcaggattttcaaagctgccttttgcagcatatttcccattgccttgcgcaccttggctcgttctgtaaccaaattagctctggataaaaaagggaccccgcagactgtacataccagactcagtacgcggtgtcgcgatcgtcacatcaagtgtccagatctcccagcacacctcttcctcgcctttccctgtcagtccaccaaaccagtgccccgaccgacgtcgtttcttctcgtagaactcgactgcgatccgccctcgcacacccccgcccccaccgacaatttggccatcctgcccgccggctgcggaggacagatgctgccggaccagagctgatatccgtgattcaatcagtgtttccaggtctgcatcgtttatagcggggagtgtgaagtcgagcacgtcaaaggtgactggacggatagaagggaaataacggtggaagaagatgaggttcaggacgcctagcaggaaaaacttagcacaaacgacatgattaatatgtctccctcacaactgacccttcagtacatctcgcacatgggtggtgtccgcgaagatctccagaaagtactccggaggggttttgcggggctccatccccgccatgacgcagctcacaaccaggccggttgagtgcagcctcaaacggttcctgctggtgaaagaggaagtattgtcaggaatacaaaatcgagggacagtcagtaaaaaagttgttgcatagagctggaggggtgtaaggtggagtgatgattccgaggccgatatggcaaggggggcgggtctgtatcggacgtagccgactgaagcttatcgcttatcatcgaactggggtgaaaccagcttcaaagaggacatctatgttcaaggagtacgaagtatacggagtagaagtataaagagcaatgagaagaggacaagaaagagacatacagggcttagcgggttattgcgggatggccatgccaaatccggagctctaagatacgatcattgatgatttagagaaatgagtgaagatggtcaaaagtttaaagctgtaagctattgcaggtattaaaatcctctgtggtgctttatagacgcggttcacttacattgcatgacggtgagctctagccgaggcctgaaactggcgatcagcgcccgaagccgctcttccccatctactccgtacttaaccatccatctcccaaatatatcatgacttgggatcgcctgtcattttaacttcttccagagaagcaccaaacacaaatatgatcggtgcgacgaggcgctggttccagcgcaatcgcaaaggtcttgcaatcggggctggggtgataggagctggctatttggccggacaatacctgctgtctaagatctccgaggcgcgggaacgcatgagcagcgatcggattgctcgcgagaagtcagttttccttgtttttgatgactcctattcctccgctagcaagcacgcgagcttgtagcacgtgaaagcccgaccagcataccccggaccggaatcactgacccatggcaatagtttgcgccgacgattcgaacaaaaccagaccgattgcacatataccgtcctcgcgttattgccgaccgccgccgagaatattatcgatgccctcccagttgaggagttgaccaaggaactccagcagaagcgagcggagaggttggctcggctgaatgcaggagaggcgactgggtcagatctgagctcggtttccccgagtctgccggacgaggatcggaggagcctctctagtttccagagtgaaggatatgtgcacgcaagccaggccggcgatgctctgaactcggacgcacaacctcggcccaaacgaaacaagacacagctgtggaatgaggtgaagattacctgtgagtctgtttcgttcatcataaaacctcatctgtcagaaattaacgtttcttagctatcacgcggtcttttactatgatctacactctctccctgctcactgtcttcactcacatccaactcaacctactcggccgccggaactacctgtccagcgtgatctcccttgctacaccacctgcgaacgtctcgacaatcagtcttgaagaccacgatgatgaactcactcagacattgggcgatgacttcgagaccaaccggcgttacctcgccttcagttggtggctgcttcaccgcgggtggaagggtataatgggaagagtgcaaactgccgtagaggaagtatttggacctttgaatccacgcgaggatatcagtttggccaagctctctgagttgaccttacaaatccgcaagaaggtggaaggcagcactgaggacgagcgacgatctcaaaaatggctttcttgcttgcttcccccggcagaggaagaggaacatgtcttgcgcgagtcgggcgtggaaggcgtagccgacccaacctcttcccagacggcatcgaagctgcgacacctcctggatgagacggcggatttgatcgactctccctctttctcccttgtcctcacacttcttaataacgagggattctcaactcttatcgatcaaagatgtgccgctgacgccttcaaggcgcccacctctgcaccggagactgccccgcagtccttcgattcaattgccactgttgtgcccctggctgccaactcagagcgcaagacaaagcttgccaatcttctggctgtcatgactcgccaagcacatgtgattggcaatggtgcccactcaccaaatgagtatctggtcgccatggaccagaacgtgcgtgagctcgaagccttctctgccgtggtctatagttcgaacttcgacctcgagcttcttggtgccaataatacagcggtaccgactagggagacagatcttgtcgatgccgaaagtgcttcatcgtctttctccgagatgatagttgagaaagaagacaaagcagatttaaaggaggatataaatgagtcacaatcacgcaatgccttgcccgaggagccagccttcaacgagcctgcgcctgagccgttggcagactcagcctttgaagaggcttggggcaaggccacagatgatgggagcatcttcccagcaggaggaaaccagcccgcacagtaatacgatgaagataaattcaatcctgatggcgattgtgtgattctctacaaccttactcccttgtttttcgcacatcgctgtgggtctggttttcatctccactgcatacattatctttgcgatagaattgtgttatgttaatgatatatgtcagttcaagtatctattcctagttagttctctcgaaaattcctactagcgcaatatagctgtgcatgttttctctacgttgattatcgaggtcctgaaccctacggtttagcgagcatgccattgtacaatcctataccccagatcaaagtggactagtgtgagtggagcggcggggggcttatgcttggggatagtggcgctgagacacccaaggcgaagtcttaaagagattatggagccatattaggtatctgcaaataacaagcttggaaagcaaaggatatgccagacatatgcgccaatcccgctagcctcgggactgcaaattgtgacatgcagatgtttttgcgtctacttagtataacagacatagttcatactacatactatgtcctatatcgcacctttttttccccactgtcacaatagtctctgtcctcgaccggtgccttgttctgaatgccaatgtacgatcaggcacaggtacttctcctttgtgtctctgtacaaacctggatacgctgaaacatcttgacgtcatgactatatattttcctttcgcagcttccgagctccaccaatgagctaatcaagcccacttcgtgtggcgcagctgtcttttatgtcgcgcaattgaaattttatcgtatttgactatacgggagatggactacacatgtattgaggtagtacgtttagggcctgattttcgccctattaaatataaggggttgaagcattgccttaactatgccctttctttcaagggatagtccaattatgcattaatacagccctgggagaatcaacccgtagctaacaagtactctggatggcggctatttggagttatttccctgtacgtggtactccgtaaaaattcccctaacgacgttttctcgcaaggaggtataccccgcagtgcgcacaggtgcaacatgcaccgtgcaagtatcagccataataggggccggggccgatgacagcgggctgatcattgggctgtatcgacctaaggggcttagatgatgcattagaagccaacacatcccataataaaggatattgtccctgaatttaggagtatatacggggcacggaatagcttatgcttatatgcaattaaatatccaggcaagcattatttgagcaatatagcacacgcggcagtccccactcatatggtcgttctgcctatcaaaaagggcttgatcttcgatattccctcacaagagagggctaggtctagtagcagatactcgaagttctgaaacgctggccagaattcaatcgtctctactagggacgacacgtgggccaagtacatctccatatcggttggtgaatccagcaagatggatgacacagtgggccatctagttcgatctgatcggcactaacattatgaaccagcatcatgtacttatcgcttgcacgagtggcagcagataagcacaacttgaagtctctcggggtccccgacactagctgccatgctgtcatttccaatttcccgcctaaactgagactataggacacagggcgcctgtaacggacatagcaggatatctgactgcagtctctgggacataggagaagacaagggcagtgtaaactggcattgtcgatagggtacttgttgcttcggagttaccggcggctggatggtggagccggctgatggctgtagcccctgttatgtatggtgtacgttgactgggaatctagaggcccatgactcgtaccatcatactaagcattttcgagaagactcgttagttagttatcctcagtgggaataaccaaggatcctgcgaatatgatgtcgctttcaagtgttcacatgctcaggggtaaatttgtagggatggcatgtcaacgtagcatttatccatgaggaaaagcctgttgtgaaagaaagacatttgacatgaagagctggagagagacaacaatttgaaacatcttgaactgtaaccatataccgtaaagtacccagcctcaggtgtggctgagctaagtactccacccgcaaaattgggtgggaaggtacttccaaggttcctccgccgtgttccgtatcgtccaatcaccttgctcgaccaaggaacggccggtcagagtcctcaaggattcccccgatgtgccctgtctctccttaagacctgcccatcccaaccattcctctgcattcgacatttattggcagactccagcactgatttgtgcttcttcgtaattcttcactatcactgcagtcaccgagatcgcaccgagatcacctcacgattgagttcaggactttgtgtcgtcaccctcgcctcaaaattaccccgaggatcaacccattgcacatctacaacgccttggtgccattacatatcgaaggcctttactctcagtcttccgcttaagacctcccaaaggggattgtggcggctgcatactgcagtgggcgctggggccgcattatctccctatccgccagccgcgcgcatcggaaacgcagcgtttcaagtcatcgtcacgaaccatcccacatcctgaagtaacagccagtgcacgtgcactcacgaccaaaccgaactcctaggacagcgacctcgcacattgggatattaaggccggtgtactatcccgcccaacatgactgactttcgaatgcccctccatcaagggcctcctactcggaagcccctctctggtgcccagcacgcgtatggtggatatcagtcctacgattctccccgacctcaacttgcgccccatctagcgagcccgcagaccacgcacagtcggactcgaaccacatcctccaacgtgttgccctactcaagcggctctcagcattaccacggcactccctcacctcctatgtctcaaatgactcttcctcaccatccaccatctcgccgcatgtctagcaccactacctcgacctcgtctaccagcaaccacccggtacacacgggaaacagtgtttctgacatccgacgaactgcttcggctcgctctgccaactctcagcttggatatgtggcccttatgcggcggcaaaaagctaccgtatggtgtgaccgggcacaacctgaagacgctagattgcgcgaacaagccctgcgggataagaaacgagcatacctcgaagttcatggctcaggcgctggccggtcaggaaccttggctagtggcaagattcgacatggtcctaagggagctgctgaattttcaccctcaaacctagtgggcgccaaagtccccgtgcgactcagcgcgaacgagatcggtgatggggacgatgacactctcagcagcgagggtggcgcaattcacagacggaccggtagcggccgcagctctctgggaagtgcccaccgctacccaagtggatactcgcggacaccgggaacaatgggcagcaacagcacgcctccgaacgaaaggacggaccttccagaagtatccgaaaatacaccggcggagattcacgaggaagaaaagagccgactgtcatacctccacaaagacgatgccgccacaacacacagcagcgagcaagagcaagaagactttgttggcgacatgttgggtccgaatgccggcactgcggcagccgataaagccctcaaagcatccgagttacgacgacgaggcagtgtagacgagcgaactacttccatgaccaatgtgcgacttttcgtcgcaaaccccgattcagacagcgactgatgccctcgttctcatacggcgtctgccaactcttgtatccttcatctccttcccatatcgccccgccttctatcttttatgattttcacgtggtttctctttatgcctcgtcaactgcacataatacctatttcgttgcaactccacaccgaccccatttggcaaatcttgatggtttagaccaatgcgtccttctgctttgtccatatctttgcacgtttgctgtctgatttactccttttcatttaaagcgccacatctctgtttctctctaggcttccctctttcttgtcttgttgtatatcctcgatcgcactgctggtctccatagattggcttcctggcttgtcttcatccttctccggctgcatacgggccgtcctggcgttcgtcatatggcctagcttctcttaatttagaggtagtacctaattttcaaaccaaagatcatctcaatccgtcttgcatttgggataacttgtgtggagtggtatgggcttttgttgtagcttcttgcataggatagagcgaggtaattaaaccacgacagtaacagaaggacatacgcaacttgaaaatattgaaaatattgaaaaacacacaacaccatactcattccatattgaccttgggagtccacaatgatgccataaattgtacagcatactgaaaacccccacataaaacggcgcccatcgggcacttgggcactcggccctgccccagccctggaggtgggcacatatattggttacataagcacacacgtgcttatcggtcgcgagcgcgaaacgattaacgcgtcccagtgttggcccatctactccgtactccatatgttcatcaagcagcgaagtcgatattctgagattgaagaccaattgtcttttgtctgtcccttcaagtcgcgctttcccctgattggcacgacctaaaccactcatgaactgaagtcgcgatctatcacacgacagtctgtccccatcgccccttcctcacctacctacgctcctgagacttcggattcctacataaccaactctttccatctattctcgtatcaatggtacccaagacatctctatcgccgatgcagtcggtccggtcctttcccgcaccaccttcaccttcatccggtccccgaaaacgctcaattcacgaggttgatgatgccgatataccctcgccaaatgcgaagcgaccattgactgatttcgacggcggaaatcaagaaaatcgcgatccatctcttgcctcccagcctgccaacactacttccccgcaagttcagatcaagcgtaatcttccacctcccccctcggtcgaaatcgtgatgagaaggaccgtacataaacaaaatgaagatggtgctggggaatcaacatccccaggcaccaatactgcttctaatcctgagcttggtacgccggcctctaagaaacgcaaggtagtatctgctggcacagattccaagcaacaagaaaaggaagccaaagagcgccagaaggccgaggagaaggcgaaaagagaggaagagaaggcgaagaaagaagaggagaaagccaagagagaagaagagaggcgcctgaaggcagaggagaaaaagaagcgcgacgctgagcgtgatgaagagaaacgacacagagaggaagaaaagcgcaagaaagatgcccaacgtgaagaagagcgcaagcagcgcgacgaaaagaagaaagcaaaagaagatgaaagggctgccagggaagcagagaaacgtaaaaaggacgaggagaaggagaagaagacccgagtaagtggcattgacaattgatttagcagcaagcttcccatatactaaccaatcagtcacaaatgaaactgaactctttcttcaccaaaccatcggtaccttcggcctcatcaggacttgtattcacggctccttcgcctaagaaggcatctactcccgtcgattcctcttgcgaaactcgtggcgcgcagtctgactatgagcgagagtttcctgccttctttttacaatcgcatacagttgtggcaccccctcatcggttcgagcgtgacaccgaagccctcaatcacgtacacgaaacgatcgattcatgtctacgcaacgaaatccacacccaaacacatccattccgtcccacggaagtcttccagataattcctttccgtcgcgggcgtcagccaacgacctctgtcagagacatactattacagctacaaaggtctgacgaaactcagcctactcaaaatcagagcataatgccaactccgaggccacaagaacttctacgtaaggtcacgatgaagtctctcaagtttggcgaggacatccgccctccctatcaaggaacttatacccgtcgcgtgtccgagttatccgcgagaagacttgcgcgaaatccttatcatcgagggctgccggatactgattatgattatgattccgaggcggaatgggaagaacccgaagaaggtgaagagctggactctgaagaagaagatgaaggcagtgaagagggcgaagatgatctcgaaggcttcctagatgacgaggatgatgcccttgccgagggcaaacgtcgtcttattgttggtgatctagagcctgtctctactggaatcaagtgggcggccaatggagtcgagcctgaaatggaggcctatcggatagagactatatccgatggggtcaagttccccatcgaccccttctcgactgcatattgggaaagagcaaagcccgtggatcaagtacttgggaaagcgcgacccgcgacagccctagacggcttccttgttcctgcagtcccaggggcagtggcgacgggcagtgctttacctcccacatcgaaagcgaaacggccattcccgccagaccaacttgcagagttcaaggaagctgttgaaggcagcgatctcagtaagattgggttggtcgagattttgaagaaacggttagtcctatcatctccgctaagttccgcttctattagagcatatactgatccaggtgtatctagattccctaaggtgtccaaagatacacttaaagctaccctggaccaggttgctgctcgtgtcggacaaaaagaagtggacaagaaatgggtttgtcggtgagagtatgctgaattacctacacgagtacctacgaacggagtttggatgtacctaagcatttgtaatgtcaccatgaacgattcacctatcatgatccaacagttttgctttttttatttattttaggagtcggggtatcccgggttagctgcatgaaatcaatgccggttgtgcgtgtcgtaggacgatgtatataagccaggatgatacccttgcatgtgcgcatgttgccactctatgacatctcgtatttctcgccttttaggcctcagtgggtgatttaataggctctccgatccctatttagtatgtcgcacatatgtgtaaaataggcctttaggatacgtaagagcagaaagtacacgtctataaaatccgaggggcgcatgaggggcgcatggacacctcattccctgcactgccaacgcatcgtctcgttgtactcggtacctggccctttaaccctgctagcgtcgttcttataagtcgtttctacttggcttttggcacttttgtagtctgcaactgtccgttccgaggattccttttttctattcagaatcccggccttttttttctggttttatactccgggtttccattagttacctatttttacttggatttgaaaacaaacccttcttccctccttatttttttcccttttcctcttcccccgccttttcttcccacacagtcatcctggaaaccacctgttccgccgatcgagtgcagtgtcactctgagcacctgagtttcatttcagaatgcgatagggatccgtcggctagggggggtttgcgactgtctgtcgctaatggcaagatggtagaacaccaagaggatcattcgtcctctttgcattctacaaccagtacgtcattatgtttttgcgcattttctcccttatatggggctgggacgctgaaagaggggcgctcctatctttatacccccttattgtgattgcagcccaatctgaccagctccagccgagcaaatacctactttccccaaggttaatacaccatgtcccttgtcgtatcgggcgcaagatcccgcatctgtgcctttacctccttcacctccgggatcgccagtcatgtcgcccacattcgtcaaatctccgttgaacgtggggccaggtgagttgggtggctcgggccgtgccagtgccacggtagtggccgctccttccaatggacacaatcccatacccgcgatggcttctatcatacctgtacccgtggaagatgtccctcagatctcattcgaagattttgccactcgctaccaccagaaccagcgcaagcaggcccaaaggaagcgactggagaagcgcctgcgtgccaccaaagtgtccattggcgtctctgcgcgtatggttcgtgtcgggctgactgcacagcgaggtctcgtcgaagccctccgccatgatgacaaggccagtttcgttgctctctaccatacactccaagacctccaggaatcatgctctgcaccggctcccaacgatggccagaccgaagactccatggacggggagccatccttgggaactgacattggccgtttcccggatttccttcatcagctgagccctcagtctcggacggacttcctggaaattttgcggctggtccgctctgatccccagtttttggtcgaccggttgcaaagcctgtcgtcgtcccaattggctgcttttacttctcctgccactgctttggataccaatgatcctgcgtttccttccacctcccgggcccgggcccagtctttcttgaataagagccagactcagtccactgccttcaaggaccacgcttatgcctttgagaggactgacccattatctgtacttctttttaacgtttttgccgctcccttggacccagggacgtctgaagcccgcttgcgtatggaagtgtggtcgtccgtctgcgctcaactaatgtccaacggaagtagtagatactatcctctgatcggccagatcctttcttcctggaccaccgacagcacttggaaagcccgctccaagtttgaactctacctgatggacattttacaaaccggtgcttttctcctagagcccatagccactccacccggactggattttgccatggattccctggaccccatgcgcacggatgttgcagaggaattctttgcttccgctgtggatggcttgttctctgtacttgatgacccggacggcggctttcctcacgccgtgctgcagtttgcaagagccgttttgcggaagctgaataaccccgagacccgcaggcgcttcctggagtttttgtttctccaatggttcttttccaagttcctctatcgcgcattgacctatcctgaggtatataagcctctagcccttggtgaacttgcgaaactgactccaatttgttattgctttgatagacccacggtcttctcttagatttccatatcagaaaggatgcccgcgagaaattgctgaaccaggttggacaccgtgcctacgctcaagtctttgctgttatgcgttcaatgtacgtcacctgaatcctctgccgatgcgacactgttgctaatatattcaaggaatcatttctcaccccctcgtccgataatcaaggacagtatcgagaacatgctctctcgattccatgacgcgatgccatcaaaggtctcgattgatccttctattcgctcttcacaggcaccacttcgacgaaagtcttcttcaactttcttgatgatgtctgctttagatgtcctcacactcctagacactctcttccaacagacgccttcttctttgcattcctccccggcatctgcaggagttaattcttggccatccagtccaccatctttcaatcttcggccagactcacttacagattctggattcgctcgtttcaagcacgacacaagttcaaaacatacatccaatatcggttctatattctctatggagactcattctctcttcccaccggaaaatagcctgtctgaaaaggccgctcgcattcgattcgaactaaccgacttagaccatcccaatgagcggttgagcttggagcatccctccgatgagcattggactatcttctcagttgcagcagacggccatggcttaacatggagccttctccctgatagtagatatgaaacgtccaagggcccgattatcgaaagtgaagatgatacccagtccacgacgctaggactggaggaaaatcacgaagcactacagaccgcgatccttcgacttgtccaagaaaaccgcattcaagatgtgggcgactatgaattcgtttcacggaatactacgcagccggccgccatgtccttgaagcagcggttcaacgaagcgatgttctgctgccatcatgactctgattttgttggcgcacactactggtggaatgcttcacagcagcttgggcaacggggaatacctagctcatcgaggtcgacagacgattcatggatcttgggcccgatgcatgagaattatagtcgctcgctgatccaatcacgagctgtcattgagcgttgcgagagtgactttgtgtctctcgatcacagtctctgccgactccagactcaagtcaaagacctgacggccaccttttgcaagatccgagacaagatgtggtacatgagcgacgtcaagaactccatcagatatgaggaggctaaacacgtggctatggctttgaaagcgatgatctactcagcccgtctcttcaaccagtaccccgaagaacagcgttctcgttacggaacacgttctttgggtggctctttgttccagaaacccgaagtacaagttatgaacatgatgaaggcacccagtagccagggtggaccgaataagctgtctgacgagcaagtcgagctgacccagaaatggttatcgcacaacggcatcgacaatttctgcaagggagaagaaagaattcatcgattctgctacgaggtccgaatgagcatcaataaactagtgggtgaaacgatgaccgagacaccggtgttatgggcaagtgaacttttccagacggaacgctcgaaatatgaaggttactctcgcacattcccaggaatgtccatgccgagcactcctcggccctcaacgaccacaagcgaggacacaaactctgcttcccacttctacggtgccaatatacctctgctcgatcctacgtctcgtctttctccggatattccgtcattgggtcacaagccctctttccaaagcattatttccgataaatggaggcctcagcgcgatttgccttcagttgacatgtcttctctcggaggctcaccaggccgtgctgcttcgacatctaccggtgacacctacagtacattctggtctgcacctcagaagcaccctatgtatgccgcaagcgcgtcgagcgtgtactcgcggccaccatctatgttcagtgagacggcaacccgtcagccccgtcgtgtcgaacgcaaaccgcatgggaagacggtgttcatggatgacttgagacagacactaactagtctcctcttgagcgatctgggctctccggtatggagctgcggtagtgagactgacgcctggttcaccaatgcgctgaaccagaaacgcattcaggtggaaatgcgccgacgagctgctgtccagaaattctacgtcgattatgacgagcgctctcagcatcttggtcagcaacgtggttcactgaaaggtcgccggagcaggtctatgggtaaccttcgtgaatcccaacacaaagctcctcgtgtggagccctcgtcgcagctaccgcagacatttatggaatcggacggacagtcggcattttcatacaaggcggtcttccgccggctgattgaagtgttctcgcgtcatggaaatccctttgtgaagctcaacgcgttgcgggacttgcgttccttggtggttgcgtcgctcatttcgccccaagatgccaattgccctactgatatcaactcttccccgggcgaaggtgagaggatgaggagcagtccgcaacttcatcgggccactcgccacagtttctcagaggtgcggcccaacaacctaccacagatggacccattgcttccttcctctcctcccgagtctgtcacatgtggctcccgacggtctgactactctactccgtccgaagcacaaattgtagcagctttgcgggatctcatcctagaaatgaagccgaagacccttttcagggacctacagtttatctccgcgttcgtcccaggagatcagctaaacaagacggattgcgggacagcattcctccaattcggtctggccgcactgagcctcaaagaagagatctgccacagcatggttgaaatcgccgaccgaatcgtcttccaagagctctcccgtcgtcatacccctttcgcctccgacttccaatcccgccctggccatgctatccaagacgcagcgggaatgtggatcatcactgccaaagaaggcaacccagtcgcacaacgcgaacttgcaatcctttatctgacccacccggagcttctcccacgcgtaacactccctctgaccctcccccgagataccttcaaggcggagatgatgtatcgacgggacaaagactctaaatcggatccgcagagtatgtgtctggcgctgcactggatgcagctgtcggccagtggtggtgatactcttgctcggaaccgacttcgtgagcgtgaggagtttgactcaatcgcatgagaggctttctggcctgtcttttctcgttttgttgtgtcttttttcttctctcattctttctcttcgctggttcgattttatttttccccttttctctctcactctctctttgactttctttcctttcttatctttacatcgcgtcgatgcatatatatccatatacccctgttcgggcgatctagttgggtttttttaacattcgtggactttgagactcttgcctcggatttccgtctgcgcttggctctggaacatgactggcgttcttcaatacatcggaagactaggcggtttgctgtcttaatctcagtttaatgttatatttcctttcctgtctatttaccagtaatgttcgtatcctttcatgctagcttttgaagatcaggacgaaagcgtcactgacagtttggccagttttcaaggctgtcgtatagcattaaggaggaggttgcctggacaacctcacaatatcatgttcaacctcccatagttatctcccatctaaacgttagctaagctggatgcatcgggtagatgatcgggccgacgtcatcgagtggatttgcacccccaccaacttgaccttatacatcttcttcttctttcctttgctactcgtgactagtgactactgtgagctgactcttatctatctgagtcaggctcatttgattcatccgtttttccccgtatcagatcaggcggtgctcagcctcttttttttcccgcacggattgcaaaatttgaagcctgtgatataatcaaaataaaacaggccacatccttttgattcccctattccccacccctggaaatcagtcttcttattacctcgtccacttgcaaatcgggcgacactcggtctttcctaactaccatcccaccatgactaccgcaccacacatgccgggcaaggcgcacagctccgatgatgtgcaccagcggccaagaggtaagtccaaactacatcagcaccagatggtgaccgacagcaacgagaggatctgaccggtgcattcttgcgccaactcaacaggcatcctcaagaactccaacccattccaaaccgcctccgctccgatggcacccaccgctccaccctcggttctaaccatatctgagcccgaggagaccaaggacatcaccatcctcaacaccctgcagaacgcaggccggcgatcctcgtccacccgcccagggtctcagtcgcgccgacagtcatcagccagcgcccatgacgacaccgagccccgcctaaagtgggatgaagcgaacctgtacctcaccgagcaggagaagacagcgaagatgaagatcgacgaaccgaagactccttacgccccccactacgaccccagcgaagacgaggagcagatgcgcctcgacgatgcaaagcaacgcctcatcgatgcgcagggcctcctcgtcgacgagctggacaagtcgaccaaaccccggaaagctgtggcagaagatgaaatccccgacctggagctcggtgagcccgaggaaaacctagaggatattgctatgaacgatgacgctcgtgtcttccgtgaccgtagcatgagtatggactcgcacaagagcgagaagcatgttcaggtcggcggggaagatgcaaatggcgccgaggcgcctgagcatgatccgctcttgacgactgaagaggcccgcgcacggcacgctcatttcgagcagcagcggaggaggcactatgagatgaggaatatcaaggagctacttgcgtatgttgatcccggtgctgcactgatatctcgattttgaaagctgacttgagacatctagccatcccgaggatttggacgaggaaatggaagacaacgacggatcggagactggttccccgtcgtctatgcctcaaattcctgaacggttccgtaccaacggaaaatagagatggcgcccccttgtttttttcctgatctttccatgtgctttcgtatatttgggtctagcttttctcctacagcggggtggccttaggtgatttcagattgccctcgcgctagtctctccagtttttttttgaattctgtgttctgtttttctgtgtatattcccccagtgttatcgccctttgccgggatctttattcttgctcgcgtttagtctgggtttccacttcgcaaactatctcttcgctctagaccgaggtatatccatttgtggccctttgatccaggtaaatgaatacatgatttgccttgccgagacagatatagcatttaaacatcatagcatcgtcgcttcttgtctaattaagctctgatgatctggagatcgtccctgggcttgtcctacatggatataaaggcgaaaacaagtatatttgtgttactagacaccctatggtctttataatactaccaaccaacacctgtaatttaagaatggcccacatcatgatcgacattcagctgagattctacagccactgggcatcaatgcgcgtcgaagacaggttcacattggtcggaataaggaaaagcaatcataacattcgatctgcagccaggggatgaaaatacggagagctggtatctcattagtcccttgaatttaggaaaatataggcgatgtgcctcccaagccatctacttttggtccatgtatatatttcgcatgaacctcttcgctcagtcctaattttttcatctcctgctttgttttcttgataaatcaatccagaatagcgataaaccaggccttgaaaaatgcatcctttaccggtccctaagaaacatgtttcatggcaaacatggggatatcactggcgctcgtccgatacgtttattctcagcagcatgtccatggcactgttcacaggttcgtgccttgaacgattacatcgaagacgttggatcgtatcttatgactgaaattgcttctttagatgagatgctcttcgccttcatggtcccattactcccttacatcttcgagaaccgcttagagctagacacgtccctcacccagcgattgacctccctatttctagttgaaggagcgttgatatctatcatctcgagtccgtttgtcgggaatatagccgaccgggccagctccaagaaggtcctactactggtgttgctggtactgacgctgatcagcgtattatgtctatcgatcaccacatcatgtaagttttttgttagaatcgcactatcaccctattgctaaatgagcccagtgacctggcttttgatcggtcgcttcttccaatgcattgtcagcaacgcattattcatcgtcggcatggccacaatgaccgagaacatcggatcagaacatatgggcaagatagcaggcttgagcacgaccatagtagcagccggtacatgttccggtcccgtcattgccgggtttctcttcggaatcggaggatactggacagcgtgggcgggcgcggctctgttcctcgtcgtggatatcattatgcgtctgctcatgattgaaaaaccacagaaacgccgcgagaccgcttgtcaagatcgaaatagcagcgaatccctatgcgccgaggagcagacaccctcgtcggaaacagaaccgcttctcgatgcgggtcagtcgtcgagtacagaggaaattggcggttggagcttctacgtctgtcttttccgtcagcgtcgctttacggcgggggttacttgctattttgtctttgcgttgtttatcgcctgctttgagtcgacgattgccatgcatgtccggtatgcttttggctggggcgttttcccggtcgggcttttgttcgcgtctatacaaggaccggggatggtcttggctcctcttgttgggtacttgaaagaccgtgtgggatcgagggtgcctactactattgggtttctctctgttgcgcctttcctgtggtttcttggagtcgctggtgatgagcgctttccgtgggctacgttgggaacaaggggtaagattatttatgccgtctgtacgactatgattgggtgctttatgtgcttgcttatgggtgttgggacgatggaagctactggtaagttggggtgtcatttctagagactggaatgctgatttgttctttgcagcaaccgtcgatgagttggaggatttacatcctggcgtattcggtccctacggagggtactctcgtgctatttcaatcacgaacatgagttggatgtccggtctactagtcggacccatcttggctgggtttatggtcgaaagatttgggtattttgagctgcagtgtgtacttggtaagtgatgtgtgtcggcggcttgcttcccattctaacaatatatagtggttatttccttgctggctagcgccaacgctgccttttacctccgtccaaccagtccccggaaaggagagtgtaatactagtgaatttgggaccgacgaagaactctaattgctagacgtctaagagaatagaatttatggcaataatgttgattcggcttgtcagcttgtgtgggggacgcggtcaatgtgtgtaagaacacagctgtcaaaaatatgcatcagagacaacttgtaataattgaacacgacattatcatcgttggcatctgcaccttgccaatcccttacctgctttgccaatgtgcttgcgcgtatgtaggttgagagtttcggtcacatctgcatgtgtccgtttccgaatgtggcttggctgaagctgactgtatttggctttatcctttgtacggagttaatctgcgtggtaatttagtttaagtgtaatattcaattagcatcttctaatgcaatcttgttaggaggttacacgcagagatgttagatgcatggtgcaatgtgaggttagtattttattaaacggtcgaagaagctgaatattaactactactagagactatttatgaggtctgacagatattttgaatattatattctattgttacctattgagaaacactgctttcacatttctaaccactgtataagaagccattccatatcagccagggtgattgttggctggcgcaatggttcgagacctctagtacctactagggaaaccccacaattccaagagatccccccttaagctccttgaacattcctaggatcggccttccgaaaaattgacaaggtgtgatctcgaggttgtgggcgacctccacgttaggatgatcttccatcttactttggtgatcacctacatcactaacccaacaataaagcaataatcccgagggtatcaaaggcctagatgcctcgggtaacagagtacggagtatatatcaggggttacacctggtcaatgctccggggtgtcttaaccctacggagaggtcaggtgcaacctcggtgatcgtggcgatcaagggagaagaatggtagcagggtatgcagctaccagctctattaattctggctatttgcactgaacttgatggtaaatacattgcatgatgcaggacttagataactatctgcttctcaataagtagctctttaaatctgggcaagattgccttcatatcgtacatgttctcaaacttccctcatagacggtggatgctaaatgtctaattattcttatccctctggttacaatatcaataagagaaaaactatctttaggaagggcctatgagattcacataatttccatccgatatatagaaaccgcttcggacaatggctcagatatccggcatatgtatatcgacatattttcaaagttatagaggctcggatcttgatagttgtccactcagaatgtacccatgaaatgtgctgcgcatataatactatcttatatacctaggcatttgcggtaaatcctaaagaaccatttggctggtagaaacacatatactagtataacgtaccagggtccttaggatacatgaaacatatattaatgctataacaattattgaagctattgaaagttgcgacctgtgcaagatatctaaaattagaagtgtgagtgtgtactccgtagagattaacccaaccaagtgcaacattgatattcccacgtttaaaaaaatgttaacaaacagaaacataggaaatgtacggagtagaaaaacaaaaatagattcaaggtggatgtgatacgtcgatcatgaaacaacataataactgacaggtggtggggattgattagtggcctgattattgacaaggcaactgcaccccctgcggaatcaaaaccccctatttcttttaacctcaacacaccctcaatttcaatcctatcaatcatgccggacaccgctgatcagaatgcgcccgttgcgcctgttgcgcccgttgcgaccgctgtgcctgaagaagccgtcaataagcccgtggaaactcccgcgactgctgccgaaaacaccgaacagactgtagccaaagatggaactgccagtgctccagtcaaggaggaagtcgctgcaaatgatgcgactgtcgctgccactggcactgcagagcccgaagccgcaaagcctgaagaacccaaggttgagcaaccagcctacctgagcaagaacccggccttgggtgaattgttcaatcgcctgccaaccatcctcgaaagcaccggccacactgagatgtggggagtagaactcaaggatagcaatgatgtccccaccgtcaacgtgttgatcaagttcctgcgcgcaaacgaaggcaatgccaaagctgctgagacccagctcagcaaggcactcaagtggcgcaaggaggtgaacccgctggcattagcggagtccgcgaaatacagcgcgaccaagttcggcggtttgggatacctgactacctacgaggagaacggacggcccttggtgtttacttggaatatctacggcgctgtgaaggatatcagtgcgacattctcggataccgatgagtaagaacccatcatggaacgccatttacaattgcaatcaatgctaactgcgtatagattcgtccaatggcgtgccgctctcatggaacttgctgtgcaggacctgaagatgaaggatgccactgaggtcatcgagtacgacggcgaggatccctaccagatgatccaagtgcacgattacttaaatgtcaagttcttccgtatggatccatctgtccgtgccgcaacgaagaaggtcattgaagtgttcgctacggcatacccagagctcctgagtgagaagttcttcgtcaatgtgcctgctatcatgggctggatgttcactgccatgaagtttatcctgagtcgcaatactacgcgcaagttccacccgatcacaaacggcgccaacctggctcgggaattccctgcttcaattgccgaacagatccccaaagtctatggtggcaagggtccggagctgaaggagaatgctaggttcatcccactgatcgaggacaaggaagaggagacaaagtgcaagggcaagtctgccgagaagtctgccgaggagcctactgttgctgagcccaccaaggaggagactgctaaggagcctgccacagcagatgttcccaaggccgagtctctgaaggaagaagctgtgaaggatggagcccagtagttcaaattggctggtgctgtctgttatgatacccggaggagcagtgaataacactccccgctcttgtgtacctggtttcgggtcatttgtgtgctctctcaagatgcactgtattgttaataccttatggctagccatacctaatactattattatctctttatcacaatgaagattgattgatgtcttcatgaagcgaaagcagcctaatgtaggcttggctgtacggtagcttatacggctgactttagaaccactcgcgcaactcttatcgacaagctttcatcttccttcattcactgtattacttctgtccattgaaatccgctgcgtcttatccaccatttagatacaatactgactcaatagcaaggcctgttattgtctagtctgtggatccgctggcggtggcctcagaatgcgactcgcttcctaaacctcatctgccccctcccttcacctcacttttcgcgatagcaccattattatctaaacccgaatttatctcgatcttttcctcacacacattcattccagaccacggccttccatcatgtctgtctggaaccctgataacatccgcgatgtcgccgaatccgtcggtatcctcaacctcaataacgatgtgaccgagaatctcgcccgggacgtcgaatatcgagttgcgcaggtcttggaggaagcactgaagtgtatgcgccactgtaagcgaacggttcttaccactcaagacattgcgctggcattgcgcaacctggacgtggagccattgtacggctatgactccacccgtccgttgaagttcggcgaagcctctctaggacctggccaaccgctgttctacgttgaggatgaggaggttgactttgagaagttgatcaatgcgcccctgccaaaggttccccgcgaagtctccttcactggtgagtgaatactcttccctacttatgtgctgtacagcctctaacgtctactctagcccactggttagctgttgaaggtgtgcagccgtcgatcccccagaacccgaccgctgccgattctcgtaacctcgaattgatctcgaagggtccgaacgccaactccacactggcggcaatcagtggcacaggcgatgtggctgtcaagccactggtcaagcatgtgctttcaagggaactccagctctactttgaaaaggtctgcagtgctttcttgaacgaaacaagcgaagattatcgcacctccgggtattccagccttcgcgaggacccaggtctgcaccagctggtgccatactttgtccaattcattgccgagaaggttacgcatagtctcaagaatgttttcgttctcactcaggtgatgcacatggccgaggcgctggttcagaacaagtcactttacgtagacccttacgtgagcaaacctactatcagagaagaacatgatcagacgctaaccgcatcagatcgcatccctcgtaccatccattcttacctgcctcatcggtcgacagctcggcggacctgcggatctcgcagagtcattcgctctgcgcgatatggccgcctctctcctcagtctaatcgccaaaaagtactcccactcatctcacatgctcaagcctcgactcgtgcgctcctgtctcaagaccttcctcgacccttcaaagccattcggtgctcactatggtgccgtcatcggactgcaatctgtcggcggctctgaagtaatccgagtgctcgtcattcccaatttgcacgaatatactaaactcctcggcgatggattggacgatgctgctcgtcggccagctgccgagcgagttctgggtgcacttgtggctgtgttgggctcgctgcgtagtagtcaaccgtttttgaccaatggtcatactgtcacagacgacctccgctccagactagttgacaaagtcggtgatatcattgcatcaagaatcgtggaggctggtgaggtgcagctagcacatatcattttggaatcatgaactttcgcatggtatctctcgggtgcttttgcgatgagatcccgatgattgttcgtacgacatggcgttatttcgggcgttggttcagggattatggatacctagtagacatattcaggatgtggatgtgtttcattcttaaataatcacgttgacacacacattgatcagtgtgttttatatggtaactccatccatggatatcctagtgcattcccctatttgatatctatctcgacttttcttccctcgggaaacgaagggctttgctttttgcacatgtgcttactctcatgggtcataattttgtggcgcttgtctgttgtcattcacattggtagtggcttgcgtagaattcatattggtagtggcttgcgtagaatacgcatacatagacgcttgggccccccgttatatgctgagtcatgcatagcttatgtaatgtcttcagggacaaagtttatttctgcctagtctcaccgctcctgtgagaaccagggcctcgctttggcgttttctttcgtctctcacaggttgaaatcatccgtggcagtctgcacattactgcagctctaacttgcccaatttgtgtgtaacatattacagaccccaatactccgtatattccctgcaattgaaactaacacaattgtttccctgatgtcagacaaattttgatccgatttgccccacactgccgcgggcccacaaagaaaatcactcattaccaaccgagctgaccttcagcaaacattttgcacttcccctcccactcgaggtcaccaaggccacaacaaaaactgctttgccaatattttttttcttagcgagagattccttgttctctctagcccacaagtaatcaatccttgatctcgggcacccatcgggcttttgggtgagactgtcctacagacaaacccccgccgatgttcacgactgtggccctccgctacctcgtgctgatttaagtcggacttgtcttcgccttccatgagcccaactgatcttctgcgattcttgtctaagcccgcgaagtaagtgtgatttttccctctgtgtttggaaaagccaaaacaatcaaagccattgaatcgagacatcacggccaatgtctatcttttattatagcactgtttctaaccagcatcctgctctaggcctcgataacgcgactcccgtcgtcaccaacgcctacattttcgaatacccttttttcaaagcagaattctcgtctgctagacccgatactttgaccggtatcggtatctttcaggacgagggtaccgactgctagtcaccatttctcttagcatcttcttcttgtccttcgccttccgccctccttagcagccctttggtctgtttggagattatacccgcctggtctgaccagttaaatctttgtttcagggccttctcttctcagacgggcatcgcccccttggccgtctgggtaagtagacagtgcttctatagcctatcttctcgaagtacatagggcggtccgacgtcactgtttctgcttcgttcaacccaaacaagtacaacagctcaagctacatccgtcatcatggtttacgtcggtattccaacgaactacaccacctcgccgtcctcgttcgtcgcggggaccccgtctctgacaatcaactatgaggccacccaggatctcgactcgaccaatgccttcgaaggtcctgagaagcttctcgaggtatggtttgcgccatctgccgctgaactaggcgccgccggccccgagggcctcaagaaagtgcccggggaaatctggaaggacatgttggacctggtcaactgccaagtgctttccgttatctcctccgatgagatggacgcctaccttctgtcggagtccagcatgtttgtctggccgcacaagttgattctcaagacgtgcggaactaccaccttgctttcgggactcccccgcatcttggagatcgctgctctgtttgcaggcttcccacgcgctacggcgcctccatcccggggtatcacggtggctgcggctccctaccgagtcttctacagccggaagaacttcctcttccccgaccgtcaacgtggcccccaccgcagctggcgcgatgaggtgcgctctatggacaagttattcgtcaacggcagcgcctacatgatcgggaagatgaatggagaacattggtatctctaccttaccgagcctggcaccgtactcaccccaccggcgagtcctaaggaggaggttgacttccgcgagaccgaaaccaaggttctcagcttccctgaagccaaactgcgcactgattgtgatgagcacgatgagactctcgaggttctgatgaccgaccttgaccaggaaaatgcgaagcagttctatctcgaaaacgccactgctgtggccgagaagcgtcaccgcaactcggagaaagacgatgatcatctggatgtcttcagcaacacctccgacatggatgaggagactggtggcatcttgccacccgagctcaccactgagggccacgctctgggcactatcgtctctgaggcatgcggcctgtccgacgtgtactccaagagcaagttcccggatgctcgcatcgatgcgtacctcttcactccatgtggcttctcggccaatggcgttgtgccggctcctgatggcaacgccccgatccactacttcactgtgcatgtcacaccggagcctcagtgttcgtacgcgtctttcgagaccaacgttccgcactctcagaatggcaaggccaccgccgacatcatccagcaggttgttgcgatcttcaagcctggccgtttcagcatcaccttgttcgagactaagcccgcgttggatgagctcgacgaggcgaatgggcagcatgatgtggcgcacgctcagcgccaggctcatcgacgcagcaacaagatggagcatgtcgaaggctaccgtcgtgtcgatcgcatcgtccatgacctgaacggttatgatcttgtgttccgttactacgaacgcaatgactggaaagggggggcaccgcgacttggagagaagggattctgagctgacctggttcttcagccatccgttattggactatctccttctcgcgggtgcgacctttctatccgtttgggtttctgcctacttggcattcaattttgcacagttctttctgttttgtttatttctatttttcgtgtcatctcgtttatttccttccatagtgcacagcatcgcatgattaagctgagcgactcattcttttgtcatttgttacagtggttcagtcgagaaatcttgaaacataggtatatcgagcttctcagaatttcggtttgtcattcctttgatcatacatcatacctggtttcgaagactcattttagagtccattcaagcgtcttgagctgcaatactatcattttctgcaacatattctttccagtgtagagtgtaaattcgaattctaagattgcgtacggagtacagcattcaatgtagtgtcatagtccacctcggacggaaggcggtgagatgcgtccttatcttgtcttttgtccaaattacttccaatcgatcaacgagctacattcgaaaccctgcaaataatatcgctatctacggtcctttgagagatacattactttcagtccaactagcattcattctttgttccaacccgaggttgatatcgaccttcctcccccggcgcaacggcgcagcgcgaaatcctcggccctcgaaagagctacacctggcgctcatattctaccgagaagattgggcattctcgtagccgactattttgaacacaagcttaccgagccatcatacgcgcaacacatcgcgcgcccatttacccactacaacctctcaaaatgtcgtcaccaccaccataccaatcgtcatccaatcccctcaaacgaccctccatctcctctgcctcacagccgattggcaagaaacagcgcatgcatccactccgccaaacttcattcccgaacggcatcgatgttggagatcgcagtttcgctggtaccagcgaagccggtagcgtgacaggcagtttcacagggagtctaggcggagcaagcgcagatggaatcttctctgccgcacggggaaagaaacgcggacgcaagagtaaagccgagaaagagcgggaacgggagcgcgatgatgctctcagcgctagggcgggagattctacacggttcggatcagtcgataacgagggttcggtccgaggtggtccttctggcggcggaggcggcggtggaggtgctgatgatgcggacgattatgatgacgacgacgaggcagagctgtttgggcagcaagaaggagctacggatacagaggctgagaagaagaacctagcgtacgttttctcctgtcttcgtggtaacattggatgaagctaattctcgctcttggacaggatcctggttgatgctttcaaccctatgcaatcggagcgatacgatctcttcaagcgagcgaagctgcgcaaggaaacactccgccgtatcgttaaccatgccctctcacaatccgtcccggccagcgtggtcacgaccgtcaacggcttcaccaaggtcttcgccggtgaggtgattgaaatggcgcgaacggttcaggcccaatgggccgaagcacacgaccttgctgcgcgcgatgcgttcgaggccgaagaagccgctgccgaagccgcggcccaggcgaaagcctcagctgcgaacgcaaattcaaaacactccacaccaacccccacaggcactccaacctctttcggcaatggtgttaaaaaagaaccacatgactctagtcgtacacctacaccctctatccctacttatcagaactctccgcaccaaactcccactcctctccgccccagacgcgagttccgtcttccgccaaacccacaccgtggccaacttcttccatcgcatttgcgtgaagcggtacggcgaacgaagcgtgatggtgaaggtggtggagtcggctactcgggattgagtctggagaacctgggagttcgaggctcattcacgtggaactcggggagtgcaggtgggaggaggcttttcagatgagaactcagtgctcgttgcatatttggtgagattttttactttcttttcatgtctaatactacactaaaattagcgatctggactttgggggaaaattgatacggcagactggctctgatatcacgattcttctcttccgcaacatactatgtatgcatgtactatgaacagacttgaatccagtcttaatttagaacacaagcgtatcaatcgcacattccattagatttgatcgatcgaacccagacgccctcgatcttggcaggggcgaagaatgccggtgtcatttacaacacatctaagtactccgtgcaggcagacatgattcgtattggacaggagctattgtctagggttaattatttgctccattctcttcatgtggtctctcacggtataccctatgtgtcgaattctactgttttcaaacagtcaagtctactcctagtgtaaccgacataccaaacacagccatgttctggatactacatatcacagaagggtggtgcttttctcaacttcatcctgctgcctatgtggctaggtggtctggttgggtacatggcgttctcggaattagggctattctcaatgtcatacagtagacggagcacggagcagagatggactaaatggaaatacatagtagacctatcctttatccccatccaaaatcaagaatgaggtagatcatttattcgaccctgcagaaagccaccgcgcatgtgcagcccttgctgctatccgagtggcgttctcctctccgttcctgcaataatgtgggactacatagtccgatgtccacctgtctcccacggaatatgcgattggatctgagcacatcagggctggcgcttgcagggccgcgtcgactgcaactcctttcttccttggcagcctctttcttgatgggatcgccgagggaggggattgctacgtatcccagtttcttacatgtctctgctttctttgtgttccttttactgtcattctattctttttataccctcttttttcggttggagtgggatagtcgtccttcttatctcatagcctgattcttattcggatattggacgtctttgacttgcgtttataatgcactccctccagccctccaatctatacacccgtttaatagatacaatacctacagccttgccttggtcctccggggatccatcggtgaaaggagatcccaggaagagtgttaaatgggttgacgtatgtcttgaaagcagataatatacgatatttctaacatgtttaacttctagggcctgagaggaatcgcctcattcctagtagtgctaacgcacctcgcccgcgcttgggactatgatctattctcaccacgcgacaacgaggacgccagtccgcgaatcctccaatggcccatcctccgaatcccctggcaaggccgtctaggcgtaacgatcttcgccttcctaaccggctacgtctgcgcgttgaaaccgctcaagctgtcgcgaacaggtgatacattaggcgcattcgagacaatagcaaaaagcgcctttcgtcgaccgccacgactcatctttcccgcgacgattgccctggtcatctcgtggactgttgcgcaattcggcgggtttatagtcgccaatagatccgattgctggtggtgtcggtatgccgcgccggatctggaggattcgttttggaaggagcttgttcggttgccgatgaatttcttatcgacttggacgaccggatatatggcgtacgatgatcatcagtgggcgcttctgccgctgctggtgtcgtccatgttggtttatctagtgctttcggcgactatgtttgtcaagtttcggtatagggtcttgatctatgttgggttattattgtatttccatcaggatgcagccaaggatataggtgagtgttgctcgtggaaacaacatatgagccttcaatttagtgctcgtggcagacaaaatgacccatcgctaatgccgagtacagaaaccttccaaatgcaagccatctacggcatgctcctcagcgacttctcctaccacgcacccctcaaagattggatagaagaccacccacgaggccggaagatgctcaccatcccgctcactatcatcgcattattcctcgcttcatacccaggcgaacaccccgaatgggccggctggtccaacgcaatgctcgaagcaagtcaatacatcttcccgccagacgtcaatgtcgggaaacgctacacggccctcgcaattgacatgatcatcctcgcgatcttcttttcgccttcgacgaaagacttcctctccagcagactcctactctggctcggcaagcagagtttcgccgtctacctcatccacggaaccatgttgcgtgtcgtgctctgctggatgctgtatggtatcagcgggcagccgtgggagggtcctgaggcgttgaccgatgacgtccgcgacgactggttgcctatccggccgccgtgggtcgttgcaattagtattccggtctggattgggatggtctatttccttgctgcgctgtggacggcgtatgtggatactttctgtgcttctctaacgcagaagctggagagggctgcttttgttgaggacgagaagacgccgttgccgttgcaatcggtccctatgcagacggcttgatatagatttaagttgactcacctgggcttttggtgttttgtggctgctttccttcgacatggctggaccatggccatgggtgtaaatatgacttgttctggcttttccctttgctcttcgcgtctttatccaatgcaatagcaaaatcagtaatgaaagcttcaattatagaagtgtacatagccaaatggagattgtggtcaagtaaattccactcttcaaatcacgaaaacaaaatgcgaatgctactgcgccatattttacagtttgtctaaacacacgccgatcaagcacggcgagagccacgccgcccgttgggtttgcgagctgccgtctggctattcttcaaggacttgcttgccttggcccgttcgttctctagggtttgcatgtgctccttgcggcggagttcgttacgctccttccgcatgagctcatcctcgtcttttcgctgttgttcgtattcatcagcgcgcttcttcttgtccttggcgagacgttgctccaccgttgaagtgccaatgctttctgagacagactttgagaagttggtgccgactttgccgaatttgttgtagatgcggtcaatcaagctgattttcccaccttgttccggggaggcagctagttcgctgcgtgctttctcttgtgctttctcttgcgcggctttttccttctcaagccgttccagcagcctgcgaaggggcttgctttcggtgttttgggtaactgccgagtacttcggtccattggatggtctccgggcgatcgacaggtgcatccacttccggaaggcctccgagttgatcaaataagtttgacctaggccgaaaataccacttgccacaaagtagagctgcagggcactcggcatgaacgccatgaaggcaaaagacatgacagggaaaccatacacgatgtactttcctgcttcagtttgcatcatgggcatagcgccggattcaccacctctctgttatcttggttagtatcgcagttatagtagaccatatgagaccaacttaccctcagagacagacacagcgtgcctgcagccatcataggcaagatgtacgtaggatcagcaacagtcagatccttaagccatcccacttgttccgcggctagggccggcactggcaacgtagtcattgctcgcacgactcggaaacatccgaaaccaagtggaatttgcaacatgggaataaatgacttccatgtgacaatgccgtgcttctggttgatctcgttgatctgggccctcaaaatctgggcttcctgctggttcccatcggtcgtggcagtaaacatccttttccggaggggctcagtctccggtttggcgttggtcattcttgtagaattctcggaggcgccaatgacagccttcagcattgccacacgagtcaaaataccgacggccacgatactagcccaccatggcaagccggtccatatgtgagtgtgctcgataagccattgcattgtcgtcgtgaagccccagccgaagtccagcccaagctccttgagatatccaatggtctccgggatcgcggtaatctcagtcatgtctaccgtatttttcaatgagccgtctatagcatattcagggagtacgtcggggtgggtagaggaggtggaattgaatcggattgcggccgggccgacaacagctggtgtcatgcgccagggagcactgccggatagtgctgatttcaattggctccgctggctagggaaccgcaggctttgtgaccgcaaggtagacatctgcaaagccaagtcaatttcgatgtttttgcaaatccgagtcaacgggagaacagacagatctagaggagcgggacatggcggtcattctctgacgggcaagggcagcggctgcgccggaccctttcaggccaacagatcccatcatggtggtttggataattagaaatggggagatagccagtacggaagagttgttctcgtgccgttcggcgcgactttttctgcccgggcggtaaatgctgacccacggctatgttgtacaggacaggcacagagactcggagattcgaatatggaaatatagataaatagatggaattcatagacttagatattctatatggtaacaacatctggttgcaaatgtaaatcctaattcgccaaacgcccccctgagccaaaaggtctatgtacaaccactaaattcaggtgtgcacagaaagccaggtatcgatcccaaatcacatatgcttcgattttgtcctccgcgtaaatgcagtcattgttgaacggatcaaacggcagaaacatcaatcacttattccaaagaagcagtgtccctcagtccagggcgtctccgctccgaaggaagctcccgcatttcaacaccggggcccactgcatgtgagcggcgatggttggggaagatctataataatgggagcagctaatcagtcatagaatccaaattgacttatgtaaaactactcataccttagtgttagaccatccaaggcggaaagcagcctcgtgtgcgaacagctctccaaagcctagcatgagaccattgacgaaggggaggaagaggttgatgaccgctccgcgaaggagaccccacacacttggcggcttataaagcatcatgagtgagcttgtggttgatgggaccgaggaggacaattcatggttcgcggagtagttctctgagtcggaggggacggtgatggcagagtcgtagagctcggcgggcgaggcggaggtggggtcggaggccattattaggatcggaaaagaccgaggatttgtgttgtgtctttaaataacggcgtctgagttggtgttgacccttgatctcgagaaaaaggtaaagtaaaatgatgcgatggtcccgatgagctcgttggggtatcatgtgggttatgtcagcaggttttgtgccgcgggcgcctatcccgttgaataaacaatggccttcctaactaggagaggcgattacaaccctctgctttcaatcttcgaatgtttctctttatccatcactaattttatagagctcatgtttaatgtaaagaaaaaaaaactagcagcacccaagatagtcacgcttgttatattcattgacgggaagtcacttgcaacatgaagaacttgacactaatggaggaatgattcgagcaaatagatatgtaaaatacaactatcagccaagcccatcgattccatctatcaatgcaagatgattcctgcttaccaccaccgtctacatctcgagtgttctctaatgtatcaaactattcatcccactagatcaaaacgactccaatcggctcataattatgtgctcaaaacaaattttatattaaaaaataaaaactatctatatgttaagtttcaaaaccaagtatatatgcaatggatatcaaaagacgccgccaatgtcatccatgttcttttccacatcagtcataccagtaaaccatttccacaatgctccacaagctgaaagaaatgaaaaaaattacctcctttttaaaaattcccgggaccaattcccgagatcaagtttggcaacccctatgccttgacagccttctcctcgtcctcatggtaagcgaacctcgacagacgacgaatggcctctcccttgaagtagaagacatagggaatggcgcagcaagccaggccgatgaatgcaagaagcgaactggcccattcgtcgcccagacgctcgtacatttgctctgtgaagagcacggtggaggcaccccagatggaacggatgaaggtcttggctgcgagagcggatgcggcttggtgctggtaggtgtcaactggagagatagttagcaatgactcaaatcaaaaagattgaatgcttttgatacataccaaggtagttgttggcggagttgtacagcaggataataccgaatccaataaggaagcctcccatagccggtcccatccagtgaatgtgggggtaggaggtccaggcgaagacgaaaagaccagaaggcacacaccagcaagcacacatcatgggaatcagacgtttttcggcgggaggcttaccaccgcatgccgcagacattttgaggtagtgcttgttgacaaaaggagcgcaagctgcgctcatgaccacaccgatggccagaggaatgaacatgagaccggtattagacgcgctccatcctttgccgccctggtaaacaatggggtagctagaaatatagttagtttccagtctcttttaagtgtataaagacaaaaggttgttcacttacgcaacgaagaacatgtatagcaagccataaatgacagacatgtagagagaaatgaacaagacgatgggttcaaggaacagaagctggaaggggcgaagaatgaagacgcgcaactcctcagccaatggacgagcatcaagctcggtttcggtggtatatttagggtcgtcctcggtcttgcggagtttcgctgcacgtctcttcagaataattggtgcgaatgtctcaggaacggtgaaactgatcatgacccaggcaacgaaggccaggataagctgaagccagtaaagccagcgccagccagcattgtcggccaaaaatccaccagcaagtggaccgatggccggaccaaggaagggagcagcgctgaaagcagccatgggaacaccacgctcctcgctcctccacaaatcggccaaagttccaccgacaagggtcatgggggcactgaaagcgattccgtcgatcaaacggcagacaatgagagttccaatgttcttagaaacagcacatggaatgacgaaaataactgcgagtgccagggtcagagcgtagacgggtcgacgtccgaagatctctgacatcggagcaaagaccatgggtcctaaaataaggttagaactatgcaacccatatcacacatctgtattactcaccaacaccaaatccaataacgaaaaccgtgacaataagcaagctaacttcacggctgacatggaaggactccatgggtccctcaatatcggctgtaatgacactactgcaaaaggcgacgacgaagcaggtgaatgcgacaaccatcgtgcaataccacttgtaagccttggaccagttcttgggattatcaggatcgtcgatggtgaaggtcaccatcttccaatcctcgaatttaccagtcacattggacttgatcggcctgatgatttcacccgtctgcgtctcagtgatgtattcgcgtaaatccgcatcatcggtgacctcgcggacaggtagatcgaggtaatcatcgggtacggctgcattgttgttctgagccccgagggagaccgtccggatagcctctactggggtcccatctgtgtgggtctcagccgagcgtggagcctccatgttgaaggatatgactgatgatggagggctgtacccagacaaagtatgaagtgctgtgtagttatgggtgcagggtggtataggcgcaaggggggtataggtgcaaggcgttgtattaggtgcaaggtattgcgatggctcgagatgttgtaatggtggcaagctatggtcatacaatccgggggggcattcttttataattcaactccaataaaattcggcgccgaaatttcgagaagtgggtcatgatagaaaggaaaaagcaacaaagaatgatccatggacgaactgttcataacattccatcgccgtttttcctacaagaagctctgatatcggcccgcaaccaggtgggttgcctaatagggaatggcggaactagcctaatcaggcaatatgcgacgacagacgccttggcattacagcttgattcatgatacctcattttcctttgggaaaaagacacttgctatacttttctattaccaatgtgaagctctagacttatcagcgtgcagctctactcattggcatgtcggtaagcccaccctggcgggcctttccaaggagactacgactgttacacttcggagtagagaatgcgctttccatgtcgatcaatgtgattgttgagcaacaacagctgaatgcgttgtagcctgggatatttcttttgctgctgtatacttcctatcttcttcaagggatgtctttccgagttccagcttggcatcagcttggcatcacgcgaaagcgggtcgggctgtgaccaccacgcgtcgtgagatcaatcaaggcgatcgtaatatagaggccgaattaggagagcgagaattatgaaacatagtcatcctttagatcaaacaaaccttaaaaacggattcgaacacgtagatatccaatactccgtagttgtatctactttgttctggaagagacgacctgaaacagcattgaacttattttgatcattagcttggcctaggcatattatgcacattgtcacatggatttgtatacatacaacttttccgcccagtgggccacggtaggttaatatgactgtgtttttgtgccccacctgtatagttcggaacatatcgcccaatttggaagactactttatttccacattgggaatatcaaacctctgcaaggcgggatgtcgattcgccacggcatttttagatgttctagattccttacatcaaacctaggctttgttcgctggccaatgagagcacttgccagcggttatgggtcccgtctagcatctatgaagctaggtatcttttgtatgggtggaccatataaaagatacaagtctcccagtccttaccccagaattagtgcaatatgtgtttttccggttgtttgtgtggaaatttttctccgtattattgttggagggcatactccgtactccgtaccccatacccataccccttggtggaaattctacccctatccccataataaatgtttgtttttatttcttcgactcatgtatacgcaggaagtacactatggattaccaatgtcagataaggattccgctagtatacgagatccctcgtttcaggcagacccagaccctaattgtggcgtcaaaatatcacagatctcatcatgatgcaaccctggaagtgtcgcaaatgtcacgacgccgaattggggtgaactcgaactttaatttggtggtcacaccggtatcgtgcgtataagccccacttttcatatatccaaaagtccaaattccaaaaatccacgtctttccaaatccgctaactcgggcccgtaccggaaaattccccttacgatcatgtcggcctcgatgcggaagatgccgagttttatgcaagttgaggagcctgcggagttaggcaccggcggtgacagcgcctgtttgcgaggtttgtttactagctagtagttagatcgtgtttctcctgcttctctctctgctcactttgttgcctatggaatgctactccgtatgttgtactcgtatgcagtcttatatctctcatagagatcatccctgcggtagtcatccctagaataggctaagctttgtgccacctctaggcggatcctgaggatcaaaggggggctctcacgcaggggcttttgatggggccactacggagtacacatagagcccctttatgcatgggccggatacataacttggaatttagagaaccaaaattttaactataaggcgctttgacaatatggataacagggtccagggttaagcaaaggacgggaatttctcaattagcttccagtctactttgtaattgagagaccagcaactagcgtttgtattgtaatcaatataacggaaactagcttacgaaaaagaaaaagaaaagaattcctcgcagcttgttggtgtggccccgaattacggagtactagtcttcagatagcagaaaccttagggtttattcagctctgtagatgcccaacttcagcagattgctacccaaatatcctcttatttgatgattggaccgatgaaggtatgttcgtttcagacaatccatcaggcatcaagtacttcgctcgatgttaccaaatggagttacttttccgagtacgcggctaacccctatgatattagcactcacttgctcacagaccaaatcatccttatcgagttcgggctgcgttcttcacgaaagtgttgctcgaattttcaccctagcttcatattcatcggcggcccactcacctctaggcgaactttatgcttatcgcagtcttgtcaagttcctactcaggtggaacaatgaggtgtggtcccaccaacttctgctccggcacggacttccagtagctcattaatgctgctggttaaagggggtatgaaaattttcagtagattgtgggcgctaagccctgtgggccaagctggaagtttacttagccgcggaggtcaaacttcgggagagtaacaagggtttaatgataagctgaaagggtggtttgaagattctatatcaaaattatagtgctttcctcgttgacgattgacgttcaaattgtactctagctctttctgtccttgctaggctttcaaggtgtttggttattgtcgtatgaaataagctcaaatactaagtagggtgtgatgagaaacatttcaattatgctgtcttcggtgtctagaatgtatcccaatagccataggttttccctttttttgaactttatagatgaaagaatttatatagcaaccgtgccaagcgcctaggaccaccatacatatctggtgttggagcgccccaccaaacgccagatctataaattagacttctcttccaccctgtagatatagaaaaccctccttcatttggaattggttcagaaagagaatcaggtaaaatcaacgataggaaagaactgatcctcgtattcagactcaaagcgactgagtacagcctatattcaaactctttcctgcaatacaacatactgcaagttgtatgcatttacgagttcaagattcttggcatgcaagaagcgcatggcgagtcatgatgtcaagatagggttagcgttgaagccacccaattccataaataccaccaataggcatcgcggcggagttcgaggatttaggagcgcgaaccgtaagaacgagggaaggatactcgttagcggccaaatcgacacgggtgccgttcggaacgaatgcccaatctgcttctttactatataggaatccgcaagttcgttctatgtcgtaagaatcagcccatagatttagggtagccgagaacgatgctacggaatttttcgatcatactttcatgttgtcaacccggtatttttcaataagatagcagacttggcgtacgcgactatgattcgaacatctagacaaagtgcaaggtctgtttcgatctgggtgaaaaggcattgcggaatttcatgagcccagatatattgccatggttggagggtatacgcacaatggtatgcctatcgaattcagctctccgattgtgtcgtcgacatcatgtaggaagtgtgggcgaagttttcctgcgttggggggcacgacaagatcgttcgactccataagagacggagatgattgggatgagggcgtagttgcagtggtctttgagcctcccgaagcagaggtaaattcggcctaaggttaatcgaatcgaggtatgccaggtcatgtctcttgtgacatgccaggtcgatcgaagaaagagttaaaaatcaattcagaatatttatgatgaagatggaaagaagaagcaagtgtagtagatggagcctaagtatcctttatatggtaaattcatacaaaagatacctaacttctagtttggtgtttagtggggcgcgacaacaccagacatgcaccagacatggggtggttggcatttgatagggtcaattgtaatattttatgaattgacatgtcccttcagaagatatatgaataaatacaccattgtatactatgcaagaaaatgaacgaattgaagaatttgttggtgtcaaactttaaaccgttatcgtcacatgacctagtacgataagccacaacgggtttagggcgggggaaactcatttctcttacaaaaaaagaaaagcggcgatagagtcatcgccggcctcttctagcgatcttctcaagtccacttgagagaggcactcgagccactcaatctacttcggtatcaggagaatcaattcatatctcctgtgtcatacttgattgactcattgggagaatccccaatttgcttcacgatgacttctaccgatacttatctcgccatcccgggctctgtcgccttttcccgctctcgggggcatgctattgctgatagcatcggtgtccaggacgtccgagcccagtggattcactatgtgcatactacccagcccttggaagagcctcagcgtgccgtactcgagcaattgcttcagtacggcgatatcacagacatccctcctactttcgaaaccaccgacggtcagtccgataccttctatgttttcccacgcaccggtaccgtctcgccatggagctcccaggcaacaggcatttcgcacgtctgtggcctgcagaagtacgtcaagcggatcgaacggggtatgaagatttcgtgtcttcgtaccagtgcggaggactacaagccgaagtacatggatacgcttcatgaccggatgactcagatcattggcaaggatgagcccgatctgagccttatgttctccgagcacgctcctcaacctctcaagactatctccctccagggtggtaccaagtcccccaaggagattctccaagaggcaaatacggagctcggcttggccctcgatgattcggaaatcgaatacctggccgaggcctatggtccaaatggtgcgattgcccgtgaccctactgatgtcgagctcttcatgttcgctcaggtcaactcggaacattgccgacacaagcagttcaatgcttcctgggtgattgatggcaagcccatgccaaacagtctgtttgccatgatccgcaacacacacaagaagcaccccgaacacaccgtcagtgcctacagtgacaatgctgccgtgctagagggccccgaggccgcgttctgggcccccgatccaacgaccgggcagtggatgcataccaaggaagttgtacacttccttgccaaggttgaaacccacaaccaccccactgctgtttcaccctaccctggtgcggctacgggatctggcggagagatccgtgatgagggtgccgtcggtcgtggctcacgccctaaggccggtctttccggatactgtgtgtcggaccttttgattcctggcttcaggcagccatgggagctcgatgtcggaaaaccaaaccacattgccagcagtctggatatcatgttggaggcacccattggcagcgctgctttcaacaacgagttcggccgtccttgcattggtggatacttccgcactctgctcaccgaaattgatgtgggcaatggtgaaaaggaagtgcgaggataccacaagcccatcatgatcgctggtggtgttggaagtgttcgcccacagcacgctatcaagcacccagatgttgtcaagccgggttctttccttgttgttcttggtggtccggccatgcttattggtctgggaggaggtgctgcctccagtatcgcttctggtgagggatctgctgagcttgacttcgccagtgtccagagaggcaatgccgaagttcaacggagagctcaagaggttatcaacgcctgtgtggccatgggagaaaacaaccccatcaagttcatccacgatgttggtgccggtggcttgtccaacgcccttcctgagctgatccatgactcgggcttgggagccactttcgagcttcgtgaaattgataacaccgaccgtagcatgagccccatgcaaatttggtgctgtgaagcccaagagcgctacgtcatggccattggtgaggagagcatgaacaagttcactgctatcgctcatcgtgagcgttgtggctactccgttgtcggtcgtggcggcggttcgtccgaagaagaaaagagactcattctccttgaccgagattccaaggagtacccgacccccattgaccttcctctctctgtgcttttcggaaagactcctcgcatgacccgcactgtcgattcgcggaagctgaagctgcccgccgtggactctagcctcagcaagtatcttccctctctcacctcgaggacggagattattgatgaggctatcaagagagtgttgtctctgcctgcagtcggctccaagtccttcttgatcactatcggcgaccgcactgtcggcggcctaacagcccgtgaccagatggttggcaagtggcagacacccgtatcggatgtctcggttactgccacttccttggcccagggtatgaagaccggtgaagccttcgctatgggtgaaaagccgacgttggctcttatctccgcggcttcgtctgctcgtatggctgttgctgagtcgctcatgaacctggctgcttccgatcttgtcgttcgtctcagccaagtgaagctttctgccaactggatgtctgcgggtaaccaccctggcgagggcgctgctatctatgaagccgtggaggctgtcggtctggatctgtgccctaaacttggtatcagcattcccgtcggcaaggattctatgtccatgaagatgaagtggaaggatgagacctcgaacgaggccaaggaggtcactgcccccatgtcctgtgtcatctctgcctttgcgccggttggcgatttcaccaagacctggaccccggctcttcgcagcttcgaagaagtaggggagactgtccttatgtttgtggacctttcattcggtcgtaaggcgcttggcggatcggctcttgctcaggtcttcaacgaagtcggttccgagtgccctgatattcgcgacgttgatctcttccgggacttcttcgatgctacacagcaacttcaagaagtcggaattgtcttggcttaccacgatcgctccgatggtggtcttctgactactcttgctgaaatgatgttcgccggtcgctgtggtgttgagatcatgctcgataacatatgtgcctctcacaataccaaggatctcattgaatgcctcttcaacgaggagcttggagccgtcttccaggtccgcaaggagcatgagatcctgttccgctcatgcttcgccacttgcggtcctcctccgggtctgatccacaagattggacgtatctctcaacagcccaagcagaaccttgcgatctactacaaggctcttctgatttaccgcaacacccgttctagcctccagcagacctgggccaatacctcctaccacatgcagaagatccgcgacaacgcggactgtgcggagcaggagtatgccaacatccttgacgacgccaaccccggtctttcttggaaccctaccttcgaccccaaggacaaggccttgcctatgatggctagtctttcccaatactcccccttcgccaacaagccccgtgttgccatccttcgtgagcagggtgttaacagtcaagctgagatggcatttgccttcaatgccgctggcttctccgccgtcgatgtccatatgaccgacatcctctccggtcgtgtgtctctctccaccttcgccggtctcgctgcctgcggtggtttctcctacggtgacgtcttgggtgccggccagggctgggccaagtccgttttgctgcacgagaacacccgcaaggagttccaggagttctttgaacgtccggatactttcgccctaggtgtctgcaacggctgtcagttcctgtctcgtattaaggatctgattcctggcgcgggttactggcccagcttcgagcgcaacaccagcgagcagtacgaaggccgtgtctgcatggtccgcatctccgaccccgacccatcctgccccagcgtctttttccacggcatggacggcacttcgctccctattgctgtcgctcacggcgagggtcgtgcctcgttcgtcaattcccagggcatctcggctgccgacttcgttcgcgagggtcttgcccccgtccgattcgtcgacaattccacactcaagcccaccatgacgtaccccttcaatcccaacggtagtcctgagggtattgccggtgtgcgcagtgccgacggtcgtgtccttgccatcatgccccaccctgagcgtaccatcatgaacggtattgccagttggttgcctccgaacgccgagtcctggggcgagattggtccttggggacgtgtcttctacagcgccagacgctgggtgggttagatttcttagttttatatttacggagcttttcttatcctttttttctttctcgttctgagttcttgtccatattctctttttgatactggagttgaacatgtcaaaatagcctctcaaataaatataaattgttcaataatatatctgaataccaatccaataaaacacaacgataatatctgaacggagtttatatagagaacctagacctaagggccacggggaattccgcatcgaacgtaaagacgccgagcctctagtgacgacgctgataaagctgatactttttttatagttacctatgttgaaagcttagatataccatcgactaacgagccttatggttcttatctaggcgacctacaaggcctcagctgaatagccggaggttacattcaagtgcccgcctctacctagctgtgaggaaagaagcctaggacttcattttgagacagatattcatgcacgtcgttgaaaaagtcattattgcatcttccactagtacttacgtcaaattttaggtcatataacgccaactccccgctggaaccaaaacaagggtatttgtatcaaagcctacgccaatttcgccgccattcgagcctgtcggcaagaatatcccaactttgcagcccatctgcacgaactaaacttttcaagccatccgtgacaaaggtcgttagatggttgaactggtaattgaccgttttcagctgctggctataggtcgagtcacgaaatgagactgtgagtgtgtgttcgtgatcgtaggcctcgttatcatcatcatcttcatcatcatcagactcgaattcttcttcgggttttttctttgtgcgcagcgccttcggattctccagatattggtcttcatcgccgagcaagtgcgcggtttgtagatctgcgaaatgaacacacagatctaagaaatggatgattgcatcgtggatatgtgataaatcttcagaaagaagacactgggcttccaaagaggacatgtaggattggtgggcagctatcatggcatcgacatcttgtgcgccagatagatctttgtgtagagattgggttgtggtggttattacgagataggtcagatggccgtagatgagatcgaggacccagagcatgttatgatgtagagcgtgtaccaatgtgtccttttcgtcaggtgcgatgatacgggcgtcgcgaatacgctgtttcacaatggcatatttagcgcgcctgatctgcatcaggaaggtcgagattcgttggtatgcctgtattgcgtcctcggtgattatgttcgcaataggccacgggaggccataatcaattgagattgcttctagaattcccacggtccgatgatcattttgagaaactcgcaatgaagtactagcaggccgcacaaggagtcttgatacgtcaatgacggatattgaactgaaagctgtccttgatatctcagtgagcaggaatctgtcgtcccaggaacgaccccgatcgatcaactcaaagatttttgcgtcaacaatgctgatggcgctcatgtctttggcaaggtagacatgttgaagagcatcaagggaggtccatagtccgcattgttggtcgagttcagttcgtaataagctagcactgagtgaatggtccacatccacgagtttttcaaaagcagactctactaatgcggggaaaggaagtaataatgaagaatcctggcaatagaagtcctcaaatttcatggcttcaatgtctggtagcgcatttagatggcggagaaataccatgctctttcctgcagtgaagactttctgcacaccggcctcgagaaactgggggatcctctgctgcctgtggcccgtatcaagcacaaaccagtcatgccaaagagtccgcagatccccattctcacgatttgttcgcacgaagaaagtgctgtccgaagcatcgacctgacctgtttccatccagagtcggatcgagcttgaatatgttttgaaacacataaaaaatagctccgccaggcgctgagacgaactttcgtcgccaagggcttccagcatgcatactaagttgtataaggaatcaaggcagcacattggttgatcatttgagtttctttctaaattggcgatcatgtctgcgagcaatgctagctcatgagagtgctgacgaacatcaacaagaagctggatgagactgacagttgaaccgggtgaaaggtatttgcactgaacttgagataagactctatcaaattcaaggagacgctcttctaagctccggcaaaacgtttgcatatatgggatggtctgtggaagcttggtgaaataccgtacagcgttgagcttggcgcctatctcaatgaaacactgcaaaagcgatgccagggcttcgttggatgaatgtgcgagtgtgtatcttcgatccactccaaaatcatcgtccaagcgcacgtaaatagacgtgggaaggccctgaaacatgaagattgtctccctagcaagctgggattctgtgataagtcgcgaggtggttgcttctgcttggggcaacgaatggtgattctcggctctccaaaattgggccttttctatagaggcaacaagatcgccatcctcttccgaaacaaaaacgtcatctggaatgatatacccttcatccactgttgtggcggattgaggtctgtccttgggaagagatacatcactggcaacggatgaaaagtcgtcatctgatgagtcgccagcaaagtctacttgttcccaaatttcttcgtcgctgaatgccgtcccagctgcatcaaggtccgaccaagaaagagtctcttttgcttctggtgccttggcccgttccttcggacgtttgaccgttgacaaaagagcggggcgatctgagagttgcaataagagactcagaatctctggaagccagggcatccggtcgctctccagctccgcaaggcgggcgtgaagagcttcagcaagttcatctctattcaagatttgaaacttttcctgtagtccctcgagttgcttggcgactgcaaactggtcggtgcgcgtatgagaaccagttcggagcgctccttgtacacggcgcttcagactctggacacgtgcagacccctacttagatatgagtacaccgggtgtgacgatatgagattgatggaaattcaatatattaccttgtggtttggtgatatcttagcgacagaagtgattaaggcgtcgataagcgtactcagatcagccgctagagccatttcaagacattggctcggatccaagatccaagataaatcacatcgagatgtctctagacgtcatagagtgaagaagcattgaagtgaagagagacccggctgttttacgtggatggcactagtcccgatgaggtaagatggccactcttatgcgcgcctctctctctctccgaccatctcccccctttaagcacatacaatcatcatggctatcgcgcgtccgattcgcatgctgggtgcagcatgcattcttctttgtctatttcttgtcttccaattacaccagagctcctctgaagaagggtccaagttgcctcatggcatgaaaaaggatcctcttgtagatcgtgcgtgaccccagtttcttgctacacctcccacaaccatcgcactctaagtgccatactaactgatttgatagcgaccggcgaaccggtaggaaacttatggcgagcggacgaacacgattactcccccaacagcgaacaatcggcccgcaccaatgctgcgctcattaccctcgtccgcaatgaggaacttggtcagctgctctcgacaatgaccgacctggagcgaacatggaacagcaagttcaactatccctacatcttcttcaacgatgtacccttcaccgatgagttcaagcagaagactcaggctatgaccaaggccaagtgccaatatggtacgcattctagtccggatagaacgagaggaaccaaacctaactttatatgcagaacttgtgcccaaggaacactgggacgtcccagaatggatcaatatggacctcttccgcgagtcggcaaagcttttggaggaacaagacatccagtatagctccaaggtctcctaccaccagatgtgtcgctggaacagcggcatgttctacaaacaccctgccctcgaaaactaccgctactactggcgcatcgaacccaatgtcaagttcttctgcgatgtcgactacgatgtgttccgttacatggaggatggcaacaagacctacggcttcaccatcaacctgtacgacgcaccgcagagtatcccgaccctttggcccgaaacccagcgattcctcgccgccaacccgtcgtacctcagcgacaacaacatgtgggagtggattacggatgacgtggctcgtcccgagcacaccaaggccgcgaatggatactccacctgccacttctggtcgaacttcgagatcggtgatctcgacttcttccgcggcgaaaagtacgaggcgtacttccagcacctggatcgcgccggtggattcttctacgagcgctggggtgatgctcccgtccactccctcggcattggtcttttcgccgatgccgccaacgtccactggtaagtcacatacttttatctcatttaagaaccctcactcacatgtatctccactaggttccgcgatatcgggtacaaccacatcccgtatctcaactgccccaattctcccaaatgctccggttgcaaagctggccagttcttccaaggcgcagacttcctttccaaggaggattgccgacctacttacttcaagtatgttggaacgcactaattatcatggcgtcccgtttgagctgttctctcgtctcttgtcattctggagagtgcctcacgactcgattcttgcatcaccttgcatacccctatgactttattcctgaatatcagtggcttggtacccggcgtttgagcggacacatacctgtgtgtattgatgattttgtgttccccatttttccctccctgtttttgatttaattcccttgtcacgaaatacgttcttggctacgttgctgtcttctggagagctacgggggccttgtctacattgtacttatatcgcttgggcatggtcattggtggaggctctgtttatttcggtctggtgcctcttggcctgcttgttgcagttgtcattttgtgtgatatattggctacttaggaacaaaacccgagtcccaacccaacctggctattctactattttgctgaagcaatagaccttggataaagtataaaaaagttgataattaaggaatgaggattgaggatcgaggattgaggactgacttgagcggttgataatacaacaatatgactgaacaagatggaatcaagatagattaagcaccaaccaaataaggcacacaagacctttttccatacaacagcagcactaacaacacgagagatctctaaagtatgtatacagttttctcttctacccgacctaatcctcagccagtcaaacggtgctggctaaacaacgtgcgagggggtactgtttgtttaagagaaaattgacgtaaaagtagaattgatgaggggaatttacgcctcctcggggtagagctcctcccggagagcgacgcccagctcgacgcgcagaccctcgagagactcgaggtattgcttgtactggtcggggttctcgaccttggccttgacgcctaatcacgaaggaatgttagcttgggttccatgacgaacgagactagtgctccaggataggatgttgcggaagcgtaccctcgaagacgcgaacagcggtagggaagtcgttaacacggcgggcggccttgagggcggcggtgaggactgcgacggagggaacaagatcgtaggcgaagcagttgttcaggttgcgctgtttgcaaagacatgcattagccatttgtcgatggtgcgtatataggagccgcatgttgagtgatgggtgtggctgatgccatgtatcgcacgccgatcaatatgcctcgggtgaagtcgagataagtcatacctgaagctcgaaaacgtcctgcacaccatcgaattccttctcgaatctgccattgggatacacggtcagcatgagacggccctatcatgtcgagacgattgccgatggtcgttccgggaagcgcctaacatggaaatgcagggcgctggtgtccccctcctccggcctcaatggcttgcgattgggggcgtacctggcagtgaactcttcgtatgtctcatcctcgtggccggagcggagcatggaggtagtaccgaagttgtgggcgcgagcggcggccagagtcaccggagactgcatccgggaccgggtcaattggggagctctgaaggagccggtagagcgagcggcgcgggtcgccacgcggaagatggatagggacgacattttcagaagggaaccacggtggaccggacaggaacaatagtgaggggagagaagtggatgggggcgggaaggggaggtgttgaaatgcctctaggattttgcgggtggtgtggtgttggcgcctgaggcagctgaacgggtgctgagtcatcatccgattggccccgttccagtgttctgatctctaagggtggccgttgattggctggagagttgtcggtttctacatgcgtgtcattggtcggtgttaggccatgacaagtcgagttcgtataaggttattggacttcttgttcatattgtaaagatatataacataccatgatggtaattgatgttcaagatatattgtgactcgattgttgtgcagaccggtagataatgattcgagcaattaactccaatatttatcgattgtaaatcctacaaactcaaggagggtgggcaagaagataatttgactacatacatgagtaatagtaatatgagtggtggcttccgagtagagaatagtgaaaattcgggttattatagccggcaacatctgaatcgaagatcttgatagcacgtgaagatagaggattgacaagtaaacaacgtagatattaatctacacttgtttagtcggatatgcttctatatcctgtactgtgaaggtgacacaaggtagaataaacgacctctatcactccgtacccctgtcaagctactgccaattgaaagcttctaatggtaatcaattgtaacccaacgacaaatgactggatttccaatgcaacgcttcggatatggacgtggaaaacggagactggaatcataatgcagcattagctatacagagtaaagtggtcaattgcgaaagatatgtacatagatcagccctcgggcttttatacaattcatttctttgtataatatataatgcgctagttgttggcatttacactagcatgtgattgtttcacaccaaggacaacattgcattcggcaacacagtactctgtacactatattgtgatctggggtatcatgaatcgcaattagatctaattctaatagattgaatctactaaatattagatatgttcggacaatatatccccagtcgatgccaccgggacctgatcttccccttttttatggcacgctaaacccttttgggccctcaacggacgcgccggacgcaaaaagtcactgttctcttatttctccagctttctccctctctcctcttcccctttcccactttcgtttctttagctttctttcatttcctttccttaatttggcctttctttgttttggcggtccattgcagtcccattactgccccgtcaagaaaagaacaggttgccttcccgggctatctctatcttcaattctacatccatttggtttgagagaacaacccaataccctcacaatggcttccgaaatccttaaatatgtcgatgtcccgactctcgatcgaccctttggtgtgcacctgtggcccctcttcgaccaggcctacgagaaggtcatggggtatcccgccagcgagttcaacttcaccgagggtgtgacccctctgtccaccttgaaggagactacaatgatgcttgtcacctactacgttctcatcttcggtggccgcgaggtgatgaagaagttgcctgcgttcaagcttaacaccttgttcatgatccacaacctccttttgaccaccgttagcgctattttgctggccttgttcattgagcagcttcttcccactctctggagacacggagtcttctacactatctgtgaccagcagggtggttggactcgccctctgatcattctgtactacgtaagttgcgaagcgcttgaaccgggagaaaagaaactcacaactttgattagctcaactacatcaacaaatacgtcgagttcattgataccatcttccttgtccttaagaagaagccattgaccttcctccacacctaccaccacggtgccaccgccctcctctgctacactcagcttatcggtgtgactgccgtgcagtgggtgcctatcaccatcaacctgcttgtccatgtcgtgatgtactggtactactttcagagtgcccgtggtgttcgcatttggtggaagaagtatatcactatgctgcagatcctccagttcgtcattgacgtcggtaagtcgttgcaggcccggaacctgcaaataacagaatactgacagtttcaggcttcatttacttcgcctcgtacacctacttcacctctgcctacttcccgtggcttcccaacatgggcaagtgtgccggtgaggaattcgctgccttggctggtatcggcatcatcagctcctacttggtcctgttcatctccttctacattgccacctacaataagaccgccaagactggacgtccccgccgcaacactggccaaaaatctttgatcgacatgaggaactttgaaattccttccccggccggtaccaagagcgccaagtccactggccgctccaacggccctgtgacacgctctcgcaaggcctaaataatcaagtgaaggacgttcgtgtttgaatgttttcagtgtgattgcaagaattgtgctcaagagtttgatctttgaatcatcttaagatgagctattggatctaaagttcatccaatgcttgtggccaaacaaagcagaagtgcagaatggctgctctagggtgatgcgtccctatatttgttttaatgaatgaccactcatgatgccagattccattacacccgggcatggggtatgtgcctcggagttgtcggaacgcgtgcgccaaaacttttgtcggaaatcctacaagggaatgctgttggattaccctacccagcggtctcgccatggttgtattttataatgtcgctttctcttcttctgttcatgtttgtcgttatcactccccgtttggtggcaggccattggattatacctttcgccgttattgttattaagtattgattgatagacgttagctcaaaatatcaagataaatgtaatcatgtttgctgaaatagtgtgatagattggatagataccttggtcagataccgaatggttcgcatctccatccagatccggtctgtatctcaagagacaataaagccaaaccgcaaggttatccagctccatttgcctcgaatattgaaagccaaacaaatacccagcctgttgatatggcaacagaaaagttatatactgactctagcacaatgtgcagtatcacactgaagactgcacagaagaaacaaaaaacgcaggaacaggaaccgccaggtggagcttaaatgcgcacatcatggcctgtgcgacgaggcacagacagcgccacgaaagtgatgtatcgcatatgccccaggtaacagggcgatcattgacaatgcgtcgaatggagaaacgggcaaagccgcagcctcgagagaaaaccaaagactcggactcgaaaggcgaagagaagagtaaggcaggctacatccagcctccggggttgaaaaagcggtgccagccattgatataatgggggcgcaggttcaatagaccagcgccagagacaaagtcaaaggcgggaaactgtggatttatttgctcattgcctattctcgtcgaaaagttacgagcgccttgcttggatgtcatgcgcgtggtttattcggagactggatggagatgcggggctggattttgccgtcggagcatttatgtcaattcgaaatagaacagggaaaaaagagcttggatatgcagtggtggccgtgctgacgttagtgaagatcggcccatgaacttccgctgccctggtcggatttgaaacgctttggatatgaagacggagctatggccgaatctttttagcgtcaagacccactgggtacggggttggttggtctgcaattaagttgaagcaaatgtcaagagtttgacgtgcagaggcttgggttaaagtgtatgcataaaatagggaatatcgagtccttgctggtgcattggtgtatttttatcgtacaacatagatggggatatggtgatatgacgatgtatgatatctatgacagacgagagttaactagctgtaaggagaatatagaggaccatagctgttcagcgtcaccattccaatccttcagtgttgcgtatagcccctgagttcttgaatttaccaacgccaacctcaagccaacccccctcaaggtcagttacccctggcatcttcgcaaggataattttccgtttactcaagtccctaagtgcgtttgagttatacacatggccccactgattgcctgttcccccactatcggccattccacaactgttcaggtcgagtagttctagggaatgcttcgagggacatatgtttcatccggcccttattctcctctttgccactgtgtcgtacttccttgatacgagttctcgtcttgcataatctctcaagccctaaaaccctgatacgcagaaatgcccaatcattgaacaaacgggggattaggtgcatgtgccctaaccaatagctcatagtgatctatcagatgacttttttgatttttttcccccaaagtttcaattcagtcttccggccacgatatccagtgtaacgcgttcttccccctgctgaaacgagcgccatcccgcccttattttcccccatgcaagggtgagacaccaatcacaatccctcctcaaccctcttcaaggttcactacgcgctgaactagcaaagccagcaaaaccagcaaattcagggttattgaacctttccactttctgcacgtggatgtcgtacagggccatggcatggattaatgaccctggatgcctttccctgctactgactccgtacgccgtacgccgtatattggtttgatatatgcatcccctgcccatagctccttggtcccactccggtccacttccttaaagagcccttttgtcgccctggtggatttttggatctcctttgcagctgtgcacctggatacttgacagctattacgttccgttccttgggcctccttttcatcttggtattctctagtcgagggtctttttagtcttgcatttcccttggcttcggaacggtctgcactttggaacagatactctttcttcctttgctctatgaccgattacaaccatatcactgctgggaacatgttcggacctactccctcactgagtctacaccgcttgagcaggcatagcatccaggatcgatacgagtcagatgaggaggctgtgtcggaatccgacacaggcacccaggatctactgtcctcgcctgtgggctcacgagtcggaatcttcgattcagatctcagtgccgacgagaattctcacaatgaccctgattctgatcgggatgaacgtattctcgctccgccagcagtgaaacggccccggcccgtctcttctgctaccatcaagagaaacagcaatgccaccttcgacgaagatacgtatgtgtttgatctggaagatcagatgtttctcgaactgccaccctcagattctccgccacaactggcatccagcacttttttacagccatcgatatacgtctggcccaaaccaccccagccatctaacccaaggtctcgctctgcttcaccctcgtcggtcttttccgtagaggaagcggacatccgggttgcaaaggaggtgactataatggagccccggactcgtcctacagtggtcttgatcaaagccctaggcccacggtccaagacctcaaaatctcgtcctcattcccgctccagggaaagcagccgcagccgctctatgcttgccaggaccgatagccgccgacttacactgccacgctcgtcagacccagccaagtcaccacgagcatccgagaaaagagccaccacgaagcaggcgcccaagtcagcagaagatccccagctcgcacccagcgcaaccataaaccgcatctctgaaatcccccacctctacttcccagcaccaccacgcaccctcccagcccaagactaccgaacccgaccacgaactcaaggctccgacaaagcaatgcctccaccaccactgaacctgcacgtccaccgacccccctcaatgcgcagtacaagcagcaacagcatctccacttacacctcccgcccaacaacacccttctccgccgacggcaaacccaacaattacaactacatcgacgcaccctcaccctcccccctcaccagagcctgcagtccggcctcaatcccaccaacgccctcatcgccatacttgtccaagcgcagcgggtcctcgacatacagcgtgtcgaatatgctcacaagccgctcgcctctgatgatgcgtcgcatgacgaggaaacactccgcctccagcgtttactcgctaagcagtctgcgctccgaggtcggcgttaacggtccctcttcctcgcagatctctgtcgcaacacaacccaccccgcctcccactgctgacagccatgtcgtgcgcaagtccagtcagcgtcgccatgcgcggcataatagtgtcctgccgagtgggaggggctttatgggattgaagctgggaaagaagtcgcataaggcttagagatgggggtcttggctttttgatttttgcttttttgctttctggtacttaacatatattgatctggtaatgtctttatgggggatctggcgtatggcttggatttctaggggtttgttccggtgttgtttgatattgggcgtttttttaactggtttctttcggtggtcgcttgattttttctgtcttttccctctcatctctgtttttgatcggctaagctaatgtatgacggcccttgacttaggaaagggcagaatcaagtattattctgggatggctaatgtcttcaattttggcgcatggtatgcgatttagagataactattgggtggtttagttacatagctaaatagatagggagacttctatcagatgcagtctgatattggagtctacccatacaccctgaacacaatgatcgtgttccacccaagctcctagtataggtatcttatatcctcggaaccgcgtatcctcagcttatatactctaggatgtggagaaagatggtctttaatctccttgcaagcatacacatggagacagacttctggcctcccatcatttccgtaaaatgcaagcgataccatgcgtttgagggaaatcacatgtcttgccagcgtacaggaagcttagcaaggggtactgtaccctttttttggcagcatagatccggaaatcggcttaacaagctggatgtagatgaattcgataagtgcgaatattgccaacttcacctcgagttggggatgtgctacaacatatgctactactccgcactctgcacaataagaatcgaggagagtaatcgaggatttagtgttgatgtgacccactcccccaatcgatccgagaccggaggattttatgtccgctacgttgtacaattgtccgctagggattcggccgagagtccgttaaggcaagatttggccgtaaacaaggagcaagtggattttagtgggagcctgcttctgcgcctctagggcggctttgatggttgttcaaaaaacgaattagcactattccagggatagtaagcggcacaaaacctcctcccacgatgaacagtctaccaatgccgaccagctaagagtagagtattgaaggtctgtgcacgcgagattcggagaagatccattgcaaaggaggtcacgccacgagccgtaagtgcctcgacgagggacttgttccggaggggctagataaaataaataacggtcgagactttgcgtaaagatgtccatattaatatatcgactcttcttctctggctatgggtccgagtctgagttcgacctccatctcaaacctctccttgccgtatggttcgtttcgtagcgtcgctatttggtctgtcccaaggggaaagtccgactcgaatatcggctcctctgcccctcgcatattagcgagcacgctttgccggaagtgccatcgatacgatacgtacatcggggtaaatagaaaacgcatactgatcaaaacaattgtgtagattcgaagtcatcagtaaaccgttttgaatagagttaatcttcgaaaccctggcatatggtgcatatttgttatctaacgcccgaagttatactcaacccatagaccctccttctctagggggaatatatgggcagcttcgaagccagtccaccaatccgactgcgcaagaaggttgatcgtgccggaaataacgcatctcccgtctctccggccgacctcagtgcgaaatgactcttcttgacctgaatgattaaagccacagacgtgaggaaaccacgcttcgtctgctcacagtttgacaaggaactcttacagtaacgaaaataaccgtatgctatacgtgaagtcttgacatcacaagaaatgtcatagtcgccaggacaacgcaattaattattcgatggtgtgataattcgaccggatgctcgatcctttatcgtgaggatctccgccgcaactagcaacacgttctcgagaatccagatcagattagcgtccgttacggaaccagcttaaaaggaacctcctaggagctgtccgttagacgcatcgtagaaatggacattgcgcaacatgctcctgactgacgacatggtgagtgtttaacagatgcagatctcctaagggattgacatagtgatgaaggaatcgatgagggcgaacttgatgtatgaggtaggtatgcgataaggcaacgatatcaacacgtgacactaagcccagaataagacgttgattcttcttggaggttacgaaaggaaagatgttggtgtaatgctgttgtatggggcacgtgcttgatcacgtgctcgtatgaacagggatcttgatgcctgaatgcctgaatttccagatttgtagttagttatgggatcaaaagcttcattttatgcaggggaccgcttacattgttacaatagatgtttctcgaggagttttcttgggtaattttttggtagtcttttgaaaatataacaattttaaatagctataaatagctgaagcattatatagtctaagcccgaaagctctctactgcaatctctaaggcattatgtgcccggtaataggaactggtggccaattacaattcgtactccacatcattgaccaccactcgtttcaccatggtcagtagagccaacttcatccacggtcgcctggacagcgcccttactatcaataaagtgagtgatgcggtctcgaggaagccaagcactctctggcatcatgaagtaggagatcaatgcgaagatggtgactccagccatgataatgggggcgtctatcaagcaacttagttagcgcgataaaaccttataagaaagaacatcttacaattcagattctcgccagtgactgggaacacgtagggcgagaacaggacagcgacaacccagccgttccagaagacaccaatgaactggaacggcttactccagcggccgagactccactgtggcttcgggaaccgcgacggagtgcagaatagtcgacccagacagatcagaccgtaggcggcagcgctggggacaccggctgccgagacaagggaagtgaaagccgtggcggatggaagaatggtgcaactgactagggcggcgacaacccagacaacaataactgcgttccgtggctgaccgtcctttacacgagagacccagccggagaatgggagtacaccatcacgggcgacggcgaagacaaggcgagaggcggcgatgatggcaattgcggtgttctgagaatgaaagtcagttgtgagatatgagatacccgtgcacaaaatgatagctcaccagccacaaagcgaaaatgcaaatgatgttcatgaagatatggccgcccttgcctagaacaacagcgtaaagaggcacaaagggttggggcccaccgaaacccatgagtgtgtcggcgtcgggctatagaaaaacaaggtcagaatttcgaatttcggcgttcgcaaagacgacgggagacgaacagcgcagaacaaaaagagaataatcgtagccaaaccaccgaacccactggcaacggtactccagaaaataccacgcgcagcagtgatcgacgcattcttggtttcttccgcaacgtgacccgaggcatcaaacccaatcagaatgccagcggtagcaagataagaaagacaccagttccagccagccggggctccggtaccgttgtacgtggtcatgaaggcctcgtgggtggtacggaatccccaggtttgagcggtgccaatgggcagccagacaatgttcaggataaagtcgagcatcacgactgcggaagaccaccaaaagacatatttgaaatagcgagctagaatgctgtcagaggtgatgaatcaaagttacgcgtttgtacatacgaggcaaaaagttcaacagggcggccagagcaagcaagatctcagtgcagatccactggactgcgcggaacttcacgctgcttgagtctgatgggaaatcgaggttgaatacggttatttcctaaacgcaatgtatcagtctgaatcccgggaaaccaagaaagaaaaaaagcataccgcaagcatgtaattcgccgcagcctgggtgttgcctataatcaaattagcaccatgtaatccttgtcttaaggtagatacgcaacatacttgcacagaaagtcgtccaagccgttgtactccaccaggcgacgataaagccaagcagtcggccaaatcgaggcccaccagcttcggcggcccacaagtagattgacccggcagacggagaagccgaacagacctcggcgatgacagcagcagtaatgaacgtgaataccatggttactaggtaactagtccaataggccaggtttccaccggcggcaataccagtgctgaaagtaacgcggacaccgccaacaaagtacagagcagctagatagagtcagtataaatgcacccacaaagtagtgacagcgaaaaacgtaccgaacgtggttgaaaaattctcgaacaaagtgtatgtccgatgaagaacctgtttagtgaattagttgctgaccacgagacatcttaaatctacgattcgacgtactggcttatagcccatagtttcctagaagatttcatgttagtttgatgtttacaaaacaaggcctggatacacctaccaataaagcggtatcatcctgtttcttgagctcagcccggtcaccttcaccttcatgggtgaggaggtcggcggaaccggcgacagggtcgtgggaagccatatctgaatgacagatatatagggaaaagaaagaacccaggtgtctgtattttctggattgagaagagatcagaaattttgaggatagactttccaaggttcgtgttcgtcctgcggtcaaaacgttcgcaaatgctccaccggaaatattaggagacgccacagccttaagtggatttgatttgatgactacagatgacctagttgggtaactggttaagttatgagtacagtaatttatcaagtgtattatatatattattatatgcctgtcttgatcttccttgaagattattcaattgccgcgcatcgcgtaagatcaaaattttttggattaagtttcaaagagggtccaatataaccttggaagctcggagctttctgatccgtcgagcttgacttgtttattaggtagtatataatcttgggggtttaatagagaagatagatttgtaaaggctatcagttgttataattattcccgtacacagccgcttccgttacacggactagaaggccgtttttggtaattcttagcctcgtgggagatgtttcacccctgagctaagactactagcttgccttgttaaatggcgatatattgtgtacctatttgtcaaatactgtcgttataccaggttatggtgccacacagctcgtggtcataccattcgcaccggggtgaaaatgaatagcaggtaagctcccatctaaggggatatgtattatcgcttttgataataattcaggggttttttgctcgattaagattcgtaaatccaatgcccctcatagcaaatctgataggccgatggcatcatatcatcaacggaacgaacaatacagccttatatcgacgcataagaacggtccgctaatatccactgatctcttagcagattgtgaatatccgcagtgcaatggaccctaggatcctcaacagattccattcctattaccacaacttaacaatctgggaaagaggcggcaaggagacatttaaggtatggacgaccggtacgggaactgggcgttattcctcctaagcaaaggtcctctcgtcctgctggctttggcattgtttggagacacgtcttttatcaatggcatcgtcaatggtcgctctctcgattctcattgcggttcatctttttgttcttttcttccatactgtttgggtgccatggctgttccttctaaggttggactggatccctcatgctagctatggtgatggcggcacactaagatttctgtctacaaggaactggttgagaaggaggaattaatcgacatatttacagggtctgtgggcgacacggaggctgatgcccttgtcgggagacttgcagttggagctgatgctccgttaagacgggaaattttacgcgctatgcttttgaaacaacagagtacccagatgaggagagaaggaagcaaactatacaaaccaccgacctccattgctatgcgaacgcacaaagaaagaagcaaacaaagaaacaatctcaatatgacatgtgatagcatgtgacaatgcaattcatgacagaaagtcaggtattggaaggctaggagcaataacaacaataagagacaacaacaagagacagcgacaagacacaacaaagtagacactgaaatgaaaagggaggaaccttctaccctcagattattgtttcatcattgggaacagagatttatccctgtaggaaggagatgagaacagagccccttttgttaagctcctaatggacaatggagaactcagagaagtacagtctgtatccgcagtggtcagagggagagtgcttctaccgtaacatgcttcgtgccattagaccaggaccgaagccccaacctagtttcagccttcaacgagccgcagcaaagttccaatcagaatcctcaggatttcccttcactggacagcagcagacgtatgttgaatacgaatctggagctggcaaaagttcaaaaaattaaaagggtactcaacaggaacacgatgtgcaatgtgggcccggagtgttggagaagagagaaagaagaagagggagaggggggagggggcaggtatttataccctcccagtagcttaaggtaaatgggaaactggggttggtgacggtttttgaccaaaagggaaggcacctgatcggggacaagatagcacgtgtgaagagtcatggaccactatctgctcctctatcaccctcgcattacgaactgcaacctacatgtaccccctaaagctcgtacatcggatgatcaagggtttttcacttaattcatgccatgcgccatggtgatgctagaggctatgatcatgaggattatattatcattttcctggtctatatatacatgctgcttcatatatatgctatgatgcaggggggctaccagactaagtctttagctataaaagagtcaagttgaactcatggggtatcaaaggaaaagagaggcaatatatgcatgatgacatgtcgtgaagtcgcagagagatgtcgactccagccagcttcacatcagggaagaagaatattcgtctgaacttcctctaaggtctggatccaacctccaggaaaggagcgtctcttgagccagactccttctagggtctcgagtgctttgtcgacgttctagattatgagatattagcattcggacccgcctcttgatgaagttcatttgcgacataccctgaaaccaaaccgtttcaactcctgcatagtttggcgaacaaatttctgctcgggctcactccgagtctcctgtccggcaatgaaaagcggccacagaaaagccaattggcccacatctttcggcaacttctgagctagtagaagaatccgactaacaagcatgtccatatacgtccactcagtgatccaaccgacacgcccagctccagcgatctgaagtagatgaacgaatgtcgccttctcgtatgcttcaatgcaacccgcatactcaagaacgtcaggatacggatacagagaaaggctctcatcatccagctcggcgggcagctgtaggcagggcggggtcgtaacacgccatacaaccagctggttgaagatgtctttatacttcgcatccgactggtcggttgtcatccacgttttcttgtctgatgcaaatgtactgatagctgcttgcacctccattaggctggaccatgcctgccgcagctcaaccaggcgtgggttgtccgggatcgttgacaatagacttggcgtcccgagattgtattcccaccctccacccatggtattccagtaattaccctcgaccacagtcccgccgggagtcgcgcatgaacctgccacatcgagatatgagagtagggagacgaggaatgggcggagggggtggttcgtctcggcgacgcgttgtacttcacgtgccgagtcgccgggttgcggatagaagaggaggttgtagatttcgcgagctcctttgagatgtactgcccagttgttgtgttgggaatccatcatctgcaggaatattagtcaattgatcatggctagcagatctagaggggaaacgaacctcgaatagggaaagtaataggcacgtcgcgaaatccgttaatccaagctgctggctggggtctgagtatcgtgcacgaaaacccttcactaccacgccgtatttgcccattgcctgctggaaatgcctattccgctgcgatcccaccgatgtgttcgcaagatgtaatgcgcctaatgcctgcatcgcattggccatggttggagacgaccgcgcgaaatccgggaaatgtgtgcggtagggattggcattgtgaggggtgttgtagatgatcaagaatgttgatacctgatccgcaaaataagtgagataacgctcttcaatgcgctggatcgatttcgcgatactgatcgaggtaacaggatgctggaagcggaacttcgttgggtgtggcagcgttgtgggggcgaccatagccttgcagaccgcattgccaacatcttccctctcctctaagggggagactgcaggagcgtcgcttgactctgggctggaggtcgaatcgttgttctgcgtcttcggtgccctggatgactctggcggtggatccgtcggtgtctgagagggcccgtagaccttgaacgtcatccgcccttgagcgccatcgcactcgtgtccaagacggacacagttattacaggccggagatgcctcgtcgcaacgaacatggcggcggcgacaggtggaacagcctgtaaatcctcggtgatgccatcggcggactcgttttgggggttcggtcggtggtgtatgtgacgtgtccgacaacggtgcaccctccctgcgtgtctccatcgggcgcgaaactcgaaagtaggatattgttcagacatggacacttagaatgaaggcgaatcgacatgaatcatgatggatgttataaggagaatccaaccttggaagtatctgggtttggaggggcgctgaacggcaaaacgcatcagctcttggccaatggcttttcatttttctatattagaatgtttcaaccaagcacatttatacccggttttcttggcccttaaaagctcttggctcgactctagcgtcaaggcatgtgcaggagctgaacatagcgctgtgctattctagttggctgttttgaagatactacagaatcaaagtggaactcgaaggattcatctagctccaatctagaccaatacataacgtaaccagctattgaggaatcccatcctttaaggggctgtttgtgtatgttaaccattactggttactccgtagaggcatcgaacttgagagtcagtttcaaatctaattgagaatacagactcacttacaatgcactgttcaaagggcacgctggagttcagaatggcccccatggccgcccgggcaatcgtcagtggtaccccgatatgcactgcctgctgctctgcctgttggagaacggcctcattgcgcgagggaacgttcacagaagcccgggtggatttgaaacgagttgcctcacggacgtatgcggctctataagagttaatgtgttaatgtcaatgtcgtaaataaacatttcaagtcctgctcagggacggaggtcggagtacaaaccgccgatttaggagctgaagtatttgatcgtcgatatcatctagcgcggttcggatctcatccaaagtgttacagcacgtagttaacgtgccatttaatgacgaaaaatggacgctcggagtgccccatggcaccgggcgatggtctgctgaaggtgctgaaatcacattggaaccatagcagttcgcattggcattggcattggcattggctgttgaaccaatagcagtggaaagggttagaaaccccaaaagtacctggaaaatcatgataacaagttgttgtaaagaactttcagggtaataataacaataatggcaacccctcgttgatcgcctgccctaaggggttatgatcatcatgggatgttcatcaatacgatatttcaccaaagatatacttcgccaaccaatgcggggaaggtaacggatttcactccgagcttcgtgccgaaacccctcttcggatgtttggaacttatttaaaagctcttgcttctttattctgacttctactgtcaattctcttacaccaagatgtcccaaggttcaagactccaaggcaaggttgccatcgtcaccggtaagactgttattccaaaccactccgttgcggatgctaatattctcttttcaggaggaggtaatggattcggtgcagctatcgctcgacgattcggcgaagagggtgccaaagtgatcgttaccgatatcaacgttgagggcggcgagaaagtcgcctcgcagaatccttccaacctcatctttcagcgccaagatgtcacacaagaagcggactggaatatggtgttggatttggcattctccaagttcgggcgagtggatgtgttggtgaacaatgcgggcactagctatcgcaacaaggtgggttcaacatattgtatgaggggacctcgctaatttcctttagccgacagcagaggtcacagaggaagagtgggagcgtgtgtttaaagtcaacgtgaagagcatttatctttctacaaaggccctgatgccgcgtttcatcgagcaaggccagggtgggtcggtgatcaacatctcctccacgggagcaagtcgaccacggcctggattggtttggtataatgccaccaagggggcagtcactaatgtgagtgaatgttgggactgtgaatgaaaatgattattgaatcactaacaatccatacaggcgacgaaaggtcttgccgcggagtacggtccccacaatatccgattcaacactgtcgctcctcttctttctggtactggactgttttcgatgttcactggtatggaagatacccctgagaaccgagagaagttcatcggaaatgtgccattgggccgactcaccgatgtggatgatatcgccaacatgtgcctgtacctggccagtgacgaggctcgttttatcaacggcactgagatggtagtggatggtggaaagtgtgtttagatatccgagaccagacgaatcaaagtcacaaattaatttctctatcccgatttaccccgcagaaacgtggggtatcacgccatggctcattctatctcctggctacataactcacctctccactatcgccactgatgtgagcccaaaaatgacatccaacttcaaatcaatcccactcatcgacctatccctcgccaactcgcccttaacccgacctaagcttctccaagaactccaccacgccctcacgtgcattgggtttctgtatatcacgaatcacgatgttccacaagacgtaatttcagacctgaaagatgctctccctaaactttttgccctcgatccggcggtaaaggaagaagtggctttacacaactcccctcactttttgggatacagccaagtaggctcagaaacaacagccggagtcgcagataaacgtgaacagttcgagtttgcaaccgagctgccagacctatggcgtgcgggtcttcctctttatgaaaggttgaaaggacccaaccaggtacatcaacctctactcagcccatcagtcatctggctcaaaagttatactgataaaaagtaacagtggccgtcacaagacctctctcttcggagcgtcatcgagagatatatttacgaattaacaaacctcagcgagcgtttcttacgcttggtcgccgaggcactctccctggactccaagactctattctcattactctcagaacagcaccgtctcaagctagttcattatcccgcctcagatcctgtttccgattctaatatccaaggcgtgggtcctcacaaagattcctctgggtggtggacgtttcttctccaagcatcgcccccaaccgtgaagggcttacaggctctcaacaagagaggtgaatggatagacgttcctgttattgaaaatacattcgttgtgaatatagggcaagctttcgaggtggttactcacggtgtgtgtaaggcgacgacgcatcgtgtgttgtcaggtccgtcggagaggtatagtgtgccctttttccagggtgttcgggggagtctgacaaaggaggaggcggttggaactctaagggatcattttgctgtgcaaaatatggcgttggaggcatccgagggtgcgagtgttgactcggcctttttgaggggcaggtatgatacttggggggagtcgcaattgaggacaaagattcggagtcatcgtgatgtagggcgtgtcttttatgcagatgtttttcatgattatgtcaatgacgatagctgagatcaaagattgagtgagaaagtcggccagctggtgagcggacggttcaccatatatattgcaatatgcaatattgtcaaacagaaaaatgagtgatcgcgttaaagtaacactcccacatcgggatattccaacttcatgataggaggttagatcatatttggatccattcaattactacttgggttgactagcacttgctctcaagtgctcccaactgctgtaaatatgtacaaattgctaatcgcaacacccaaaccagaaggatccacctaaatatataaatcatatgacgcgcaatttgaatcaatcagcagaaaatctggagccaaatctctcactcgtggtcactcgagggctcgattttagaatctccccgttcaatagtcaacaccgttggaatagcaaccaacaggctaccggcagttagaccccagttcatggcaaactgagtcatggcactgactccctcggcgtttatcctccaggccatcgcaccgcctgctggcttcaatgccgaataggctccgacaatgacagcatttactacagggtcgcgggagcgagcccccataatccagtagcagaatgattgccaaaatgaatcataggcgccataaaagaaatagagaaacattggtccgaggtattcacttcctgctttgtaatcgatatcctgcttcagaccttgtcgtaaacgctgggtatcccagacttggaaacggtagcctccgccccagatcgccatcccggtgacgaatagtatagaccagccaatcttggctcgcgtgcgacgattgacaatttggaggtctagcatgaaacccatcagaagcccgcctgccatttgtgcgatccagtagagggctccattgagagcgcgtgtgcgtaggttgaatgtcatgccattgacagcgttctgttgataggaatagaaaacgtttgcagtgtagaacatgggatagaggcacatgttcttccagttgaagactgtacgcagtgtctccatcacagttcttttgaggttcgtccagttgacagccttggactcttgagtgatgcgattgccgtggtagtgtccagaaagattttcggttgagcagacaaacaccgataaaagccatccaaagagcatgacaacaatgtaggctacatatgtcgagtctgtcaccgtcccggattttgagttgtagttgagaccaaaactggccagcgagccaatggttgcaccgaggttgaatatcacccaaaataccccgatggctctgccgcgcgtgttatcgttggtataagtgaccatgatggttccttgcgcaacccaaaaaaaggccgcccccaaaccaagaatcgcgccggctgcaatcacgaaagggccgccattcttcctcctgtcggaattcaacagtgatccggcatagagggcataggtccatccgccgatgaggaggcatacacgtggcccgaggtacttgtaaaaggagcccgccaaaagcagtgctgctcccgctgtgcatgcatgagttgcgacgttggcgttggcggagattgtgctgtcgacttggccagagcctcccatgccggtgagtgcattatacattccaggattgcaaaaggaaatcactgaaacaaggccgatctggaaccaaggttcatgatagatcctagtgacaaagtttttgtgcactcgtgggtaaatgacttcggggtcatcgttgtgcggagaaacactatcttctaccgacttggtggccatgatgggataggtagactcgagatagatatattgggactgaacatgtcaagcgctgggcattttctagataagtatatatagacatagaggatgtgaccctaatctgttccagactttgaactatggtgtgctgggcccgcaatttggaacaagcggatctcgcgcaccgagatccgttcttcacggaagcgaccgagatacggagacacagttagacggcattgatttgattttctacataagagcgtcgcttcaaatctcggttgcgtgacccgaaaacttttgctcacgccatgacgccatcagattgcgaacaattggaccaccttcagaccgaggtgcgcagtgcctatgcacactcaatcgattctcttgatactttagacctctgtaccgccttcaatcatgaggagtcacgagtatcttcctcagtcgcgtgctgtctaccggcagttgcatcctttgttgacgaattagtgcctcggttgcgcgccggtggaagattgatctacgtgggagctggcaacagcggccgagtagcgatgatggactgtgctgagatcccggtcaccttttcaaccgatgagggccaatttatcgctctcgtagcagggggtgaacaaacagctaccaaagcgcaagaaggagcggaagatgccgaggaagacggaaccgcgcaactccaagccttgaatcttactgtcaaagacgttgttctcggtatttcggcatctggtcgcacaccatttgttctcggggctctcaaattcgcgcttcaaaccgggacactgacggcaagcattacgaacacgtcgccgtccgcgattgatagcctcggggtcgattatccactagttgccttgctaggcccggaattcattgcagggagtactcggctcaaggctggaagtgcagccaaacaaattttgaacatgatcagtacttgttcaatgatgaagcttgggaagacatatggaggtcttatggttgaccttcgagtcggaaaccacaagcttcaagcccgaggtcgaagaatcgtacgtcaggtctgcaaagagactatggtactccattcgacaagaggactcgttcttccaaccgagattctaaagaacttccatcaaatacagaacgatgacgcagcaaacaccctgattgccagatgcgatgggagcgtgaaacttgcctgcgccgtggctgttacggatctttccccgagtgaagcaaatacacaactacaaagcgtcgatggcgatttgaaggcttttgttgcaaagcacctaaactcgacttacatccacggaaataatgcctcagttgaagtcgatggtgatgatccggaatattttctatgcatcgatggtggaggaaccaaatgcgctgtatcaattgccactaaatcaggtgttgtctctcgtggctatgccggcccctgcaacttcaataccgtggctacagaggagctcgtaggccaggccaaaaaagccacgatggaagctgtgaggcttttaccgcggaggcgacattcctatctcaccaattacccccgattcagcaaagtatgggccggaattgcaggcatacaccatgccgagaagttgaacgtactcatcaatcgtcttgaaagggcgtttggcgtttcgatggagagcggtacgctccgattgacaagtgacggtgcactccttggcgcgtgcatcgagggcgatgcctctgttaaaacaggcatcagtctcatatcaggcacaggctccgtagccactgctttcagaaaggactccgacggccatgtcgtcgaagttcgtcggacaggcgggtggggccatcttatcggagacgatggaagcgctttttatattggcaaaaaggctttgcaagccctgctgacaagcatcgattccagcgaagctgacgagagctgcttgagtgaaatggagggggaagtcctggcccatttcggctgcaccaaaaatgccgtgctatctcgcctcctttattctggaaaaaatccgaagagcgacatcagccatcttgcaaagattgtgacaaggctggcttttcgtgacaaagaccctaatctccaggctcttgaaattctcaattctgcagccagctcgctagctcaactcattcagccgctgactgttacctgccctccagccagaagcgtgttgatcctttctggagcactaatgggcgtgtcgaaattcagagtattgctgcatgaacagctttccttggctcatgttgctgcttttaaggaagtaatttccatagagagtgcatctgattctgctgtggagcttttggctgcacaagcggcctagccctttcatagaatcttttaaaattaaccttaatagtagaaaaacaaacttgctctctgtgtttttctctgttcaatttactcttggtgttcggcctggcaaatgctttaataaggcctatttgtttagaaatgattgacctccaagacctcgatgtaacgacctctggcatttccggctacataaagattacattctgaaaatatatctaatgctggcgtggatacaaaggtaacccatgggtacgtagaagcccctccatggaatcactcagctcaacaacctctaaagttctttcacggacaatcaacgttcggagtccaacttagctgagggatgacgtaccccaataggtgcgttgggggcctccgcacgttttttgagatcggccagaaggatggaggcatggctcaagaagaggatggaggcgttcgccaaagtgaacttcattattacggttctagggtatgagtagaaaggaatgtcctagttgcactgttaatgctaagatgagatctgagtgcttgttattcgaagctttgggccgaaggctgtcttataattattgacggagtcacaaaggtcgagtgaaaattcagtcacggacttatagaatatggccgtcggggcgtcgatcatcttacggagaaagctgattatatcgtactagggctagggccaaggttaattatgatgctatgattcctttttttggcggctgtgtatgagtgcagtgccctgtagatggtcttgcatataaagcttgaccactctcaacttcgtaccctgcccatttacatctttcgtttgtacacacaaggctatgattctattagatgcgtcagccgtgagagtgagaaaatctctgtcaattctagtggatatcagggtccaaccccgtttgagggtcatcttgacgcttgaattactgagtagcaccgttttctacaccgctatatacagtgtaatgtaaataactcatgggatcactcatgggtgaattcatttgcaaatacttcatgatgtttacattggctacattatacagctgtatatagggagtagtaatggattagctagggcccaccgccgaaccgggtgcgggcgggcccgcgaggccgcaaagcgcagatcttccaaaggtttcttaattccttgatcccatttgaatcctgggcttgtaagccatccaaaaatatggagacacctaggctgcgccaaaccccaacacaactcagcccactattgggttgtgctttagccgttagtgggtttcgggaagtcgtgtgattctttggagttctgctgcctggttgtcactcttcgaagtttccgatattgcgactactccgcactttcttccctcaaacataactcaaccataatcatccgcaacaacaacagacctaaaaatcattatttcaagagccctcacgctctgtcatcatgaacaccaccattcgagaagagaattgcaaatcagtcgatcttgacggctttggctccaccgccgacgacgcttggttcgattaccacactgcacctatggacggcgaggaagagactggggcgcatccccatcaagttgcggctttcaaagcgtacatgaaaggcgactccacaccatccgagacagctgccatcatgaccaagcctcatgatcccgacgagaggactgacatacaacgccgacatacaacgccgcgtactgggcataatcgaagacgcgctttttcagctgcccttaagccacacgcccgccctcatcgacttgataaaggaaattatcaaggacggtgatccatcctgactccaggacttcggcaactcgtggtcagatgaatggaagcagagccactggcgcggcgcattgacgaatcggaatccagccacgagagggaagaggcgcgaggcccacgtgcacctggcctttgtggaggcctcttgtataatggctgctccgggtccgcgtactgaagatggcatattgcacatcgtgaaacagtcgctgctgaacagctgacaagctagaatatatattgcgagatttctcatttcccaacccatgcctcccgagtagcctaccccgtatagtagaataacgaattctaagcatatagggagcagtggaaataaagacctcgggaaagttgctgatatcgcttatcgtagataacaccatcctatgctaatcttgcgtcacacctaagctgttgcacccgttgagaattatttgattgactctgcctttactttttatctacatgacgtctgcgtcatatggcccgaacgctgaacaagtcgcagcaagctgtcaaacgtgccgcaagcgaaaagttcgttacttttattagtctctttggtggattctaacagactcgaataggtaaaatgtgaccgcacgccggggagatgccaaagatgccatcgatttggtgcagaatgtgtttaccagtctgattcgatatcttctcatgcgtcgcacgtgacgcacccagccgacgccaggacgcaggctggactacagcggaaacgtgcttggcgctcctgcattcaatgcaaacgagctaaggcaaagtgctccgggggcactggctgtgttcgctgtactcggaaagccttggagtgctcttatgaaatggatggtattcctcgaaatctatccagtctcgaggcaaggtcgcatgcagtccccgcctggctcatgacagccgacttgccgtcaggtgaaggattgaaccagctcgttgaagtatattttgagcgtatccacactgtgcgatgtctaggattcctacacatcccaacgtttatggagaagttgaagagctctgacaaaatatataccgaggaatccgggcttcttcatgtcatgtgtgccttggccgcgccgtttctctacggcgatatctgcagtcacggtgatgacgttgtcgatcgcgaattgagattttacgaggcagggaaaggttgggcagatactgcactgcagtattcattccgaaacctaggaacccacaaactggaatgcttggcgacagaggttctgcttcacgaatactatttacgtactggagaatatgcgaaagcattggtggtttctgggcaaattgccaggcacttgcagctccttcagctgaacgtggaatatgaccccgaagctcatcggaaagcacgattgtctactcccgtcaaggaaagcaggaggaggcttatgtgggcttgctatctgctcgatgctttcattgagtgtggcatcgatcaacttcgcctaatctcggcggaggatatccatgtccagctgccatgccctgaggatttgtttattagaggtacgccttgcgttacggaaacgctccactcccgcgaagtacctcctggcatgcatacgcatttcgatattcccgacatgcgagcattatatatccgtgcaatcaggcttcgtgcaaagattcttaagtacgtgaaagagttagaagatgaagtaccctgggagtccgacaatcggtcgcggttctctcttctcaatacggagcttcagaatcttgaagcctccattccagatgcattgaaaatgactaccgcgaacaagtatctgtataaagcatcagggcgactcaatctctttttcggtcttcacattgtactctctcaaacatccaatgatttatatcggatctgtgtctcacagctggtattccccgatacctcgaccaaatggatccgagagcatgcaccaaaatcttttctcgaacggtgtcaccgcatgtgcttggagaaagcagtatatattgcgaccctcttgaaggatttatggctgtgtcacaagcccagtctcattgatacattgtatgcaaaccatgttcaaatttgcagcagtgttttagtgactactcttctctcatggggtgacaccgcgcctttgcttccccaatttgactataagagttatcgcacaatgctgcaagataatctcacaatcctgcagtacctgcaaaagtacctcaatgtagatgcatactgtcagtctgcaaaagaagccctgaaacggtttaaccagcttttcccggcagaagctccatcacaaatccatcgtccattaaaggatggcatgatcaatgaccaagtggtgacacactcgcagtcctcccttgagtacattctgaaccctttgggaacatatcctttagctcggaagcagacacaagatcagcctacattcaataacaccgagaagggagaagccatagtgggcgaagcgctcaatatgatgcctgaacaaccggtcacaattggtgatgacaatgttgatagtttggatgaatcggtctctcctagtccttttgaatgggggtcggagactctgatgtttgattccgcaggatatcccactttcttagaccagcttacgggatggggctctacgaacttggaatggaatgaatggggaaattaaagatggtgtcttcgtctttttttgtttaatcaagcagtatgttagagtgaatataccctggcgttggaaacgtcctttttttatatgttctgaatagattatatcttcatctgcttaaacgacgaaattccctagatgccgatttcaaattccgttgatatcgcttcacgctcgtgataatggcgaatgatgaggtgacaagagatagacctcctgattggagcggcgagatccgtatactgaccggatctcggtcaagccccataataaatccgacaatgccattgagcttggcataaaacgaagtataaaatgcgatggtatgtgagatatgaatgaagcactcgaccaatccttccttgatcaaagataaatcgacattggaattcctgggttactttctcattccatctcctacaaacatgaagactctttttcaacacacagtgggcttagcgcttgcttgttcaacttacgcttcatccttccatgtgttcgacaacacagcctacgtgaacacgtcaattggctacggaacaaccaatatcaactggattcccgcatacgtgtgcaacccgctcaccgaggggggagttttaccatcagccgatgtatggaaagacattgtccttgagtggaatatctatccaagttacccactggttctcgactgcgaagacctctatttcaccgatgcttccacggcagatcttcacttggagctcatgtctactctgcaaacctgggcggccgatgtgattccctcgggtcagattattggctggtacgggctatccggaaacacaatttcttcactgtatgatcactatcgaagcctgatcgcaaatcataccagccatgcgtttttcccgtctgcctacacattcagtgacagcctttccacctggaatgcgtcgttgacgtctgttctcaagaccatcaacgctatcgatgattctttgcccgtttggccatacacttggccgcagtaccatggcaactattctttcattccctcgacgctctgggaggatgaattgaatgccttggcaaagaatagtaatgtggatggtttcgttatctggggtgggaaaaaccatgccgtgtgcaatgatgcttgccagagcactgcgggccaacagccttggttgaatgccactcgcacctatttgaatactttgtatggcatttatagtggcgacgcggaagttgaagggtcccagatttttggtggaatatagcctcgctttactttcgttgagtcgtatggcattcactgccgctgtctattcacattttgactgttttggccttggactcttgtataatactaccacagctatgaagcatctctttctgtgacttgttctttttgcaacgaatcaattcaaggtagagggttatgtgagttgagtacttgaaaatatcgcaatcaccaaggcatatattccaaattctctagagaaaatcgataagctaataggaaaactgtatagcatactattgttgagatatgaagttttagcatgtgaaatactttacgcgaagatttggctcaatagatcattttcctatatatagtctaaaagtgaggcatctcatatgaactgcccgggtggtctagtggtatgattcgcgcttagggttaacccaaagcattaatgcgcgaggtccccggttcgatcccgggctcgggcccattcttttttcttcttcttctttttaaattgaaggaatctaatatggaaatgctaaaagcgtcatgcgaaatgtcattttgattagatggcaagaatatgtgagggccgcaaaagttctgcagatcggccgatagaacgtacttgcccatattaaccacacccttgttttttttcgctaatttaggttgaagaacaataagtatacatagatcccgcacaaatatcctaaaatccgaaatcaatacaaaagagaagaggtaaaaaaaaaaaaacagggctcgggcccacttatcttttttttgtttttttgctcttcttacattttttacatttgatcattttgaatatattcagcagcatactgtcaacctctttttcattcttacattcttcccgctgaatcaaaggtctcctggacttccggttgggcttcgtcgaattgaacggccggaatgatagcaaaaggagcatgcgctccaatttgtcagttgttttcggcgcgcctatatctaagggctaacctggaccatcgagcgagctttatggtacggtgactgtgttggtaactctcaattcgaggccacagcactcttaaggcggctattccgtcactgttgaatggtaaatggaggaacaagatgaggcagagacatgcgatttctttgtatggcttatcatctattgtctaaaaccgtctaacctcgacagcaggcttattcccaacagcaatctcaatcttctcaataacctcatcggtcaacttctccaccacctccaaagctcgaatattctcaaggacctgctgcggcctcgacgcacccgtaatcatagacgagatattcggattcttcaaaacccacgcaagcgccagttgcgccgttgtaaccccaagttcctccgcaatgggcttcaatgccgcaacctgatccagctgacgctgccaggtatcatcaccaacagttttccggagaccctgcacgtatttatcctccgattctgccagccgcgacccagccggaggagcagcaacatcgttatacttgcccgtcaagacaccgcccttcaacggcgaccacaccgtcagaccgagcccgtgcgcctcgtacagccagcggtactctttctccacacgctcgcgcacgaggagattatactgcggctgctcgacgacagggccgacaaggccgagtctgtcggcgatgcgccaggcgtccgcgatctcactcgcagtccactccgacgtgccccagtagaaggcctttccgttgtcaatgaggtagttgaagccgcggacgatctcttccatgggcgtgtcgcggtctgcgcggtgtgcgtacaccacatctacgtatggcaggtctagccgctgcagcgagtggttcatgccctcgatgatgtgcttgcgggagagcccgttgttgttgagtggtttgtctgggttggcgctgttggctcggccccagtagatctgaagatgggttagtgggacaggaaaactggatgggaaattgcgcttcctaccttggtggaaatgacgagatcgttttgcttccagccgaatttcttgatcgcttctccgagcacgatctcggactttccgccggagtatacttcggcggtatcgaagaaattgacgccggcgtcgtaggcgaccttcatgcattccagggcggtttctatttcctgttaattttggtctattctatcgatcggaatggtcgtaccattcccgacgtgtccgccatatgtgagccagcttcccagcgagataaccgagactttcagtccagtcctaccgagggaccggtattgcatttcaggaagagcatcagacatttttagtttggtgagatcaaggtaaattcagggggcaatttcctttatgtacgcttgtaggggccgacggcggggttacggcggggttaagggacgccctcatgtttccccgattcagacgccgagggccttccgtggcgtgcgaaaaacggggcggcgtctgttttaggctaatcagattggaaacctctggaagagtttgactaagaattgtggtgcaatatcggctgacgatgacctcaacgcaattgaatttgtttacaaatcatgtattatcccccactttcagtgatgactacctatcaggaaacccctcattcatctcaaaactcgcacccagttggagtagcaccaggcgagtcaggataaaccggagtctgcgccgtagaagcacatttacaaaagtctgtttccaaaggtatgtccgagcaaacgctcgccggctgagtggcacagtactcattgatcgagatggaggttgtcatacccggtggacaggagctgtgtggcatacagaaggtgtcatagttcgacgagcctggcagtagggtcatgctgtaccattggtttgcagcacaagagcaggagacgactacaagcaacgaggacacacaagttagcttgccgagtacagcaacgaatgtgcagaacagaagagaaaacctaccgctgatcacagttgattcacctcccgccaacgtgccctgatacaaggtcgacgtcgtatacggaatacccccgttcgagcactcggtggtaatccagggtgcgttgagtgggaaacaggtcgattgctctatgcaatgacctggatgccaaacagacgggaagaatccctgcgagcactcgattggaggctctgggctggagcaatacgaaactggaattcctaatgtgcagtctgtcgtgtacacggcggtttgtccattcgaacactggagctcggggcctggggtgatcactgctgaagctgcagccttggtgatcgaggacgtttgatgagggatagccattgtggctgagataaagagcgcgagaaagagatagaatcggtggaggggttccattatgacggtttcacggttcattgagcaggtatcggagaacttgatatgaaacttataatgaggcgatatgtgattaccgcgaccgagtagctggagcttgttttatatcggtatagatccaacaccgaggatgtccaatttgggctctttcggaaattcggagatcactaccacggtaaagtaacagtggctgaagattagctggggcatcagagacaatgagttcagctcatactacctcgagatgcatgcaaccttcgatcaatagcgatcactgggctgagagaaatgtttcaaatgtgattataaaaatagtacctttctaagacaaaaagacaaagggatccttatccatggaaatccatgccaccgttgaaatgtcagccgaagttgacttggtgatccactaaacccacgtgatatgacgtcgtcctcatgccataatcaggcaccaaggcatgatttcccgcgccagacccacttgggctccgagggctccactccacccgtggaccctgacccgcgatgtatgttgtaggcttgtagctacggtctcatttctttgaattgctagacaactcttgttgcttggctctattgtaaagtatcattaaaattgtcaagcaagaatgccactcaggttctatacggacagctgggcagtattcagatgaagtacttaggaatagaccccaaaaggcagtattatacgattagtactccgtagaggaatttggagtagaactcatatggtacaaactatggaatttagtctacttgactatagttcgacatagtaagccaaaatcctccctggatggctgagtgggtgagagacacgaggtcatctaattgctgggtgaaatattgatcacgggtgataccgcattgggaagctcagcaatggtgaaactagtcagggtttcgatcctcgtcaggagtagttggggtacggattttatttttctttcccatgtggtcgacagaccagcctaagacgaggatagcaccttccccacaaggctccttccaatgctgatatattgatgcaggtgtccataaggaatgacgcacatataatgctatccccgagatcttccgtcgaatggatacctacgccttctccttcaccacccagatctccactcgaacaacaaactcgtctcggatgatctagacatcgtcggattgattgtctggcaacacgcatctgtgctgccgctctttctcgccgctggaatacccaatttttcaaaactacgacgaccctgagttgcttatctttcgcccacctcctcgtccataactatacggcatagacgacgagggaaaggccgccgttcagcgtcgccatacccactttttctaattggccttcacgcagcgtttcaatgaacatcatttccacgccatagatcagccgacgggtatgcttacccgccgcatctttagccatgccggcgagccctgggaagggaataacgttcctcttcaggctgacattgtgctcattaccaaactctggaacgaatactcgaccggcccgtgtccgatatcattctcttcagctgaggctgattccatcatacacttgcaaagtatgcaagaagaagttgatctccagctcaaactggtccgcgacttcattggcgtcggcgtggacggttggacctctccggacgcatatgaagctgcctattcctgcgctcgtcagatgaaggttgacggtcttgcttctctcgacacggagtaggaacgcaagatgacagatcgtcactggccatttgacgaccacaacgaggacgagtagagtgaccgatctctacaatagtgcaagaatctctacatccagcagtgatggagttttgaattgaacaaaaccgccgtccccgattgatttagtatcatcgggttttccgacggccaaccatcagtgttagaatccaacattagatcggcaacgtaacttggactatcttggaagtaaagtcctccagttcatactaccagtcccatctgtgccacgggattgtggcacggactatgtacagcgtggccattacctactgaactacagtaggctgatctttccttcgtatggagataccgagacacctgatgagactgtatgatggaacattgggattggaaaagattaagcgagaaatgtagttcgaccgagacctacggtgtacattcctaagactggagacaaaacaaagtggcggacagggatggaatggaatgcgggccagcgaagaagcttgtatgttttacgtacgtagatccgactataatcgaccaatgaggttcaattgtgtaccagccaggactaatttaaaatatcatcacgagaacggcaatatgctcaatgtacaccctcctcgactgactggaggatgtccaacaatcggaatagaataaaacaaatgtacatgaattaaagctcccagggtacaatccagcaagttcgaggtccaacttgatgtagaagcgtgggatatgtcctctcggtcaagatcatggaagaacgaggcgctggtacgcagcgcatcgggttccagacacataggcggacatcacttaaaccgagttgtggccgtgaccgtggcggtggtggagatgtctgcgagcgtggccggcagcctgtaccggctccacggcttccgggacagtgtccttcttcgcgtaggaaacggccgtggaggtctccacgatggtggtcaacgaagtagagacagtccggacggctccagtgctggtcgagtacacgacaccgttgccatcacagatgacgtaaacatcacgttcgagatagatgatctcttcggtgataggatcgatgatggtagatgtgatggcggtcggggttggcgagggagtcgaagtagaagtgaaagaagtagtagcttcggcagcgctggtcacgtggaggttctcaagcaaggtgttgggatcgatcgaaataccaccaacggaaactgtggggagtgagctagtcgggattgaaatggtgggaactgaaaccacactggacgtggtcgtagttgcagcagatttcatcgtggcatactcagggccccactggatagccataccgccaggcaatccgtcctcgtgcagttcacaattttcgtttttgatcacggacgggacggggaactggcattgacgctgttcgtcttcggtctgaacgtcgaagatctcacagtcggtaacgatacctgactcgcttgtgcaggtatcaatggcctgctggagaatgccatcatcccaggcctgcatgaaatcaccgtggtatccgtatccagtgggatcaccgttggcgagcgcgaaatatccatcgacgtccttgaatgcgtaggtgttccagatagtctcgtagaagagtgagaccaggcgagtttcgaaaccctcagggcaggtaccatccatgacgagcgacgggtatgcgacatgagatttgtggtcagtggagtcgacatccttgccattccagcaagaggggaacatcaactcgaagcggactccgtcagtgcaatgctcatcgaggtaggtcttgttgggcaagaagtggcggtaaagggaggcttcagcggttgccgagtagtccaggcagttgaaaccaagggccttctggcgcaaagcagcctgtgaggcctgagcaccactccaatcggacttgggagggtcgggaactggccaggtgaaattgcgctggtatgggtcgcctgccagcatgcggaagttacttgggaaagcagtgacattctctccgtacagaaggtaatagctgatcggtgtcagtagaaccccactacgaaagccaaatcagacttacgcaagcatgcctccaacctcatccaccacctcggcgctgccattggtgtgcatgaagtacaaagcaggaacccagtaagcagacttgtcttgagtcactgcgcacgaggtgcaatcagactcgaggagcgaggcctcatccgagctcatgccaaagcctaaccataagttagcacatccgtagatgaagatcccatcttgacaatgcgcgcttacttccacctccatgaaccgcgtgggcatgagatgagaccgtacccggatccacaagggggtccagccgggcgagaccagttcttccacggcaaggaagacgccagaaagcattggtgaggcttgggaacagcgcaaagcaggccatcacaatggaggccatccgaatgtcctgcatcttgcgattgttgagccgcgtctacgggcttagtggataaaaagaatgaatgaatgatctcagggaaacaagtgtaaacgacagactcgccaggagtaccgaatcaaccggttaggcgtagagaaaggagtgcgagagatgggttgttgaggctaagcaataggttagaggggaagtcaagacattaagcacagctccatgcagatcgcagattttcaagccaatcctcgtcaaacaatcttatattgcccccttccagtacaagggaagaggaatgaccccttgcttgcgggctgaacacaccaccttccccgatcgaagggaaaaaaaaaggtagcagaggtatgcggacttaccgatcaaacgcgtttctcctgacgtcagtaaacaaagatgatttctgacgatttctgttggcgatgcctgaagatgcgcccatttatcagcctcaactctattttgttctcgatcgaccaaaagtactcacttgaatttttgtaaacaaataataaagaacgaaacagtaaatgagcgacaataaataaggagtgacaaaccctgagatagggcaaaaaaaggcgcgctggatgaagaggggcaggggaacagattaaggagcagaacacggggatcaagtacttcaggcaggaaacttgggaaaaaaacgcatatcccccttagcgcttggagaggggcctgagtttaatgacatggccaatcccttgagatggtagatattaggtaggctgggggcctcgtcacgatcagaagaatagcgtgccctgtacgccgtctatccctactgtattacgattggatatccgaaagtaaaatgagcaatcctggcttaatctgggaatgccagaacacgagggaaaagagaggacttcccgatatctgcgatgaaacgaacggcgcgttcctggtctaaatcactagctccgtcttggtgcgtcttggtgacccacgttggggacggggattggtttaaggggaagatgaaacgatccgtaaattatgcccctatttcttattcgataggggagatttgcaatcaggacggagtgagtataggcatataaaatataaaatctccggagtacaaattatagagagcacagagcacatgacatgccggcggatatacatcagcttcaaacggaggactccgtacctctcgatacatcgtccgactagctcagacagtagccgtttgggtttaacaatttattcctatccctgcaatatcccgatccaatccccccgtaccccgatgtctcagatctcacatgtgttggccgtgaaacagcgaagctttttggtatgattaaaggaggacagagtactccgtagttcaccggcagttcagtatctgatattttacgtggagataacaaattctattcggattactagaacgtgaggaccgaagttgacgccgaaaatgacctagttatgctagttgttccccctgttgactggaaaatggctctctgcagccaaatcaaggtgctctcccttatcgcctagcttgggcgtctataatatgcatcttcgcttccaatgtccttacgccctgccattacctccttggaagtcgacctcagtgttattgtttccgtgattcttacattctaagttccaaagctggcctccctacggaatactccgtgggctgagccgtaacccactcaacccgctatggattcgtgggcccattgaacccaccaaataggtagcaataggaaaaaacgtgacttgaacgcgactgcatgattcatacaattctggatagtatttttaggtagtttatatacatgagaagtcacttctccaatatctacatatctcagcgataaaaatccgtaactaaatgatttttctctctaggactgccaatcagctggcttacgtaccctagcacggcctaattccgagctaatgaacagaatgggtcgaaatgggtctatgggttgtgggttgaattttggcgcagactagcctccccattctcgctacgcttgggatcccctggaagttccctattgggaatgaaaaaacatccgagaaaacacaagcctaccaacggaaccagcatgatgaatacggctcggacacctttcattttggcatccaagatttgggaatcccatcccaccgtgtctggttgtccccgctcccagctaccactgtcaacctgctcgcgaatcgatgccggcagatcaacgggcaacgctgctttcatgaccgtgctttgaatcgcggtcgacaaggccatgcctaccacggacccgagcattcgcatcaagtttcgcgtggaggtggccacggcacggtcttcgggtttggacagggcttgtaatgcaacgagggctttctatcggttattatcgatcgcataatatgcagcaaatggcagacttaccaggctgaaggacaaagccgatgccggccccttcgataatcaggacaattacatacaccgctgtggacgtggttcgagaaaaaaggagtttgagaccagcgcccaacgtccacagcgccatcccgcagtacagcactggagcgtacctttggagcaatattcagtaaagtagtctcacgtgtgcgatcaagacacttaccgagccagcttcgtcattacgggtccagatatgacaccggccacgctctgcaaaagcaataatggaagaatgagggctgcactctggagtggactgtagcctcgcacatcctggaaatatatggggaggaaatacatgtcaacttgccacacggagttatacagagcactttggaggtagatgacagccgtaggtacctggccaaagagacgcagcggaatgattgggatcttcgcaaagcgcttctcaataatggcgaacaggataaagaagaagcccccgacgactagcatggagactactagtgcgctacgccacggccagatactccctccagaattgagtgggatctgtaaatccaaataagataaaaagatccccgatcaaagaatgtggtttacataccagtaagaaaaccacacacgcaatggccgcagccagtccaagccaatcaattttccccagcttttcccgccagctaccagacaccggtttcagcggaagacatatccacataacagccatacatcccgtagcaagaatcgggggaatccaaaagatccaccgccaaccctcacgactgttcgcacgcaacatagccgccgcgatgaaagggccggtgctagccccgagtccaatagcaccgctcaacatgccctggtacttaccacggtccttcaagctgaccaggtcgcttacggtgatttgcacgagggagctgatgccgcctccgccgataccactgagcgcgcggcacacatatagccaggtgacggtctgcgagaacccgcacaggatgtcgcccaggacgagaaagcccacgctcagcaagagtacgggcttgcggccgaagatatcggaaagccgaccgtacagcgcttggaacgcggtctggcccattaaataggacgtaccggtccaagtaatgctgttcccggcgtcgagtgatcgggagatggcgggtagagcagtcgccacggaattgatgtctagggtggagatgaagtagatggccgctagacataggtaggctgatagcaaacgtcggaatggtaaacgtgaggtttgatcctcaattgtgggagttctctgctcatggctctgtacaggagggtctaaggactgtagctcgtgtgacctgtcctcttgaatccccgggatcctttgcttttgagatatgtcttgctggggcggctgtaatatttgcactgggcggttgtccattgtgcccgactatgtggttctgcaaaggaaatgaggcgggtaagacttggtgatggcttatggcgagcgggctgagcacaccatgacacaagaacgtatttggactttatgtaccttttggagaatagggtcagtcagaatgtgaggctgctcggactattttggtgagagaaatcgcgacatacaagcgtaaattacgtctatcatggtttccttggcgtcatgtaaaatacaggatatattaggtctgatgcttgtttctcataaacaaaagacacattggaatacttaagcacattaaaggtgatgattcatctcaacaggatcctaagctcggaaagcgttggaatattgggttcataacgaatatcatacaaatcagagtagattgaagctctaaagtctatcccaagaaggcaatacatatacagtacacagttccatgttgtacagcgcagactacagcttgacctcctctaacgcctttctcgctcttgcaacagactttcgggcacggtgatcagaaaactcctcgacagtcttgccgccatcccgcacaataccgcgaagagcagcttcagtatccagcagcgacgtgcgtccttcctcgcggacctcgtcctcccagaaatcacgagctttatcccacctcttctgctggcgacgcatagagtaaatcaaacccacggcggcaagggtacatgactcgtacacccctgcggatggaatagcgacatacgttagagcggagagagcagaagtcagagtcgtcgtggacacgctgaaaagtaccagactctgagcgagggcttggagggatggcacggtggtggtgagcagcttggtgcgaagatcagggatttgggttggccagggaggcatgacagagtccgtcgccgagtcggggcttgaagttgaaggctcttctaataggccagcctgctggtacttgcccacggtccagatgacctccttctccgcctggcgaaggaatttcctttccaaaatctcggatgtaaccatgcccacgtcgtcaacgcgccagaagagtttccaccatgcaagaccgcgccagcgtggactggccagccctgcctcgagggaactgcggagctcagagtgagcacgctccgcccaggaagttacggctcggtccaagttcgaccgaacctcttcaggcgctacgccggcggtttgatcaaggagcgccttggcgtctctggcgattacactagcatcggctgcgtcaataagggactccactagagggaccagtgctggattcaacgcatccccagtggatgcttccgaggaagttacaagccaatcgatgagaggttgcacaccactgccattccacccacgctcgtagtcggtagcattgtccacagattcacggaatttatccagggctgtgctggcacggttgacatctaccagggacacttgctcgtttgtggatttttggtctgccactgcaagttcaatggctccgcgcaccgaagaggcctcgttcttcaggtctgaatgaccaaccatcgtgctgtacgacagcaggccatccactccacgtccacatacgatcgtgcggtgcactggataccgaacaacattatgccgaccggagtgcgaggtctggatggtaactgtggggacgaggaaggtgtcggcgtggaacgtagcggcgtgatcaggctcgacgcctagggtgctgactaggatctctaagttgccttccctcaggataggtgatggcacggatatcgtcggtagcaggtcattggggatggattgtgagatttcgccatatctaaataacgaatccctcaaatcagtactggtcacgggggatcaacacgcagatagaagacttgttcatacctgatcagcagtccccgggatgaatcggcatcgtaggagtcgagaatgtcttcccagttttctcgcggcgacaatgggtcggcaagtagtagtcgaacaagtttgcgtgcagaggtcgcatcgttcaatccaagaactaggttccaaatcgagaagaaatcagtgccatgctttcttcgaggggaagatctaatgccgaagagagcaatagcccgatcgtacgacccgaaactcaccagctactctgatcagaggcgtttcagactccaatccccgcagtgcaaattgcaaccgactgagattcacttgttctagggcggcatccttcacttcctcgagggcggcatgcagctccttgaaccgcggcggcacgctcttcgcagtgataacagtggatgtgctgaatatccggggagccgatgctgtgattgtattttgagctctggcgacccgtcgagatgtatggggtgtgtcgaggctgcgactggtgttggcgcgcaaggacaaggttcgtcgccagatcgcgcatgaggggcagtaaaagacagagctgatgtccaatggacgcgacaggctctttgccagcgcactgcgcaatcttggagccattgacgcgcggtgaagcgaggtttgtagggtatgtagttatcgcgatggcacttcggtagatgaacttggtcgagcggaagtggacgcgggaacaaggcttggcatccatcactattctaatggagatacagcaagataaatttgcattatatgtttacaaccattgagactatttccctactgatggctacgaaacatgggaaaaagcacacatgtttaactgaactgtcctatttatcgctagaattgtggattcacgggttaaatcgccaggcgagggtaaggatcaaacagatagatagggtatcgtatcgatcgtgtcgggacaaaaggcgtgggcgctggaggacaggaagaagaaatgcatagatcgtgtcataatatctcggctacatcctggtttaatcaggcatccttaggaggatccctctgtcgagaacgggggcgacctgagccagcggacctggtggtttcaattagtatgtggaattgggatagtggcctcaagtgaaaacttacatgctgatccgtcgagcaaccgtggcgagtccagcatcgttggcagcctcatgctcagcccgctccatggccacacgacgactctcctcgctctttgccataacttcttcttggctaggaggcacgtgctcgttctggatatcaaccttacgggcatcctcgaagttgtgaatagcctgtttgataccttcggcacccagcatgagtgttccagcaggaagacgaccgccagccgccgtcttcagctcagtgacactctcagactgctcgcggagaacctggaagacacgagagaggcggccaatggcaagaattttgtttttgatagcacgtcgtttgaactcgctggattcggggtccgttgacggaggcgaaattggttccttatccttgttttcaacgggagacacaggtgtaggaacctcgacgtcgacctcgtcctccaactcttccttcgagcaggtgttgagaatggcgatgagcatatccgtaattttctcaccaacgaagggcaaagaccaagtgaaaacatccatgaagttgggcagccaatatgggtggggggtgcagttgaattgacggatgttcatcacattgttctcatatttgaggacagccgccttgttgttgtagacatccaagtagttaggcgcactgaaaatagtcataacactggggaagccggtggttcgcgtctttctgtacatgcgatatccggcatcctgagcctcgtgtgctctgatgatggagagcaaattgttcttctccaaaaacgcgcatgccgcgggataagagaaaaagtaggaacaaccacggacactgttatgaatgaagaaatcgcctgtcttttcttgaccgaattcctcgagagggtcagcccaaaggatgtcgcacatgagcccgtgggttgggggttcgcggaagcgatcaatctatgtctgtaagttgtttgagcttgaaactgcggacgggacatatacatacagccttgatatcttcgagggtatgcagttcggggctgaggccgccgtggatgcagaggaactgtttgttcataaccgccgccagcggcagcgcacagaaggattccagacatgcctcgtagatccgttcactatatttgtgcttgcactccaacttgaaggtgaagtagtccgtcaagtggcgacattcatgattaccccgcagcaaccaaagtgaatcgggataccagatcttcaaggcccagagatagagcacgcactgcggggaaaaatggtcaggacggttctagattcgaaaaggagactcggatgatctacctcgatactgaaataaccacggtccacatagtcacccaaaaacaaatacctcgtctctgaagggtcaccgccgacctcgaacagcttcatcaaatcgtagtactggccgtgaacatcgccacacactgtaatgggcgcatccatttcgagcaaattaggctcagcctttagaacctgtgtaccggcgtggataatccatagcgcctgctcttcagaaagacggccctcacgatagaggtgctgcttgaggtactggagattgggcttggatgggtcttccggcgaccaaaacatatcatccggaggatagctgagagcgggtgcttggacctctaaggccacgaaagaccgttagcgatcaaattaccagatcttgcgaaagcgaccgagaccactgcggcattacctttgaccaccctctccattgtcgacacctgcgtgttgtcctccatcgtgtgcagtgtgaaatcgatctccgggaccggctgcttctcggtcacggcgcgcgctatagcccgatgcattttgacaaagattgaaatgtagtttgaattttaagttcggagtaaaggggggggggggggcggggggnnnnnnnnnnnnnnnnnnnnnnnnnnnnnnnnnnnnnnnnnnnnnnnnnnnnnnnnnnnnnnnnnnnnnnnnnnnnnnnnnnnnnnnnnnnnnnnnnnnnnnnnnnnnnnnnnnnnnnnnnnnnnnnnnnnnnnnnnnnnnnnnnnnnnnnnnnnnnnnnnnnnnnnnnnnnnnnnnnnnnnnnnnnnnnnnnnnnnnnnnnnnnnnnnnnnnnnnnnnnnnnnnnnnnnnnnnnnnnnnnnnnnnnnnnnnnnnnnnnnnnnnnnnnnnnnnnnnnnnnnnnnnnnnnnnnnnnnnnnnnnnnnnnnnnnnnnnnnnnnngagaaaagggcgggggtgtggcgggggcgagttcagcgcgggcgggatagagctcccacgacgaataagagtataggattaatagaacactgatcaagccgaagttcaaagggatcgaaaaagaaaacagtgcccaggggggtaataaaatgggtactgggggtgattgtgtgctgggggagatgtgaagggaaaaagagaaacaagttggataagcggcttctggctaagatcggtgggtctcacaccaacgttgatcgtgactgtatctgagacgtttcctttcgtttttcttctttagggggcaaagtatgattgatatctggatgatgtgagagacaagaattagatcaagttcagcctcatgacaacgtgatgactcgatgcctaaggcaactgtgatattttttaccccacgctatcagattcgatcgatcagatttcgattatgtcgacatttcactgcatagtgtgagcgttactagcaatattgtatggttcagttttggcctcggcttcgacctttcagcctaggcccgatttgcttagaccgctagacttgcgtatgcagcactgatggtctgcacgagaaatttttcatatctgcagctattgctcttcactcgacgtcggatcttatgaggcggacatttatatgatagggatgcaggcaacttacagctcagacctgccgtaggctagatctacaatactacaaatccctcaagaatgcccccctaattgatatgctacatgccccacagcgtggcagtttgatcaacaatcgttctataaatacatatgaattgagtgagggatatgactgacacaaagtataggcaaggcatattgtaagagcgaaatttgttaaaataccagattggaaaatgttgaagtgcctgaggtgttagggcataatctaactagttagggaattgtcttgccaaggaggcgctttcattcttccgccatgcaaagatatcttttcatgtaaacaaccatgccttgcgagtgtgcgcgagtgagactgattttgaggagagccttggaatgtacggttcttatcagcaggtgcgctgggttggtcaatattgatgaaacaagagatatcgtagggtttgtatcatttaggtagcaaaatgtcgtttttccaagtttatcttagattaacctccaagttcctatcgtactcaaactggctgcaatgttgtcccctgacaaagtatatatcactcactctcctctccactcatcccctccaatcacaccaaccacacagtgctagcgaggagatggcccctaagggtactgtaggggatgtatatgagtgtgtattataaaccagtagccatggatactctctattctctctattatatcccctttgcatcaggcgaataagacttttagctctaaggtttatccttgagactttccaaggttcaacttaagccatattagtcgtcgacaaagaagcaaattatacctaagatgacgtactacgtaactctaacgtcgtctattctactatttctctctggctttgcaatttttttcagcttagtcttcctctatatccatttcaatacaccttggtatcagcttcgctttgatgacggtatcagataatctagactgcaatcagcttggaagattcttgagtgcagtactcggagcgaccgttacacttattctagccaaaatcgtggagaaatgctactattactttcaatggcggtatcgctctgccaataccacaatattcaacgcaagaaccgccgccggtgaagatattcgtgcactggataacccagacgatactctttatcttccagattacaacacacctgttatattgccggggcatgctatctcaaatatggatcgagatatcaagaaggaggatctacacaaccttggagcgacaaggccatggaatggttctgtctaatattccaggactttaaaagggagcctcaaacaggattcgaggtagaaaacagaaatgaaaagagacaatgaggaattttgtatgtgctcggtcatcacattggctaccacctaactgcattcatgctctaggtgtcgttgaatttgcaggggaagggggtggggacacatttatttgctggaattacgatgctcccagatacttccctgtatgttacttacccagtttcgctacaatactcggatcctagtacactgtatgctcaatgtctttaagagcctgttagcttttgatctattggtatttttgattccggtgattttaattctattacaattacgaaatatattaaacagatcactctctagaacactctcatgatgtaccatgatatgaatttcacaggcctcttatgagtcatgaccataccttaagcttcccctactgcagtagagcctaattacaatgaaaagatagaagaaaaaagaaaaccggaacccggcggttggccttaccccctcgcgttaaaatcgagatcctaattgggtagccttggcgctctgaattattgtattacctaagcaaaagaatccgatgatcgctcggcccgggttccgaaaataagtccctactaggatgcgttaacatctgagacgtatagtctaccaggcaaacagctatctgctgactcctgcaggacgtttggccagaactccaaatcacagtgctcagctgtaaggtgtttatggatatttgcgggccaattttcagtatgtctgtcatagttcttgaagagtagaaaataaattatctcaaatagaaaagagtacaagctaaaaatcgctagagcgagctacagtacaacttatcattctagcaatgatagatatcagtcattccatcccctaatcttctataaagcctcacaagtctctcctattcactcacccagcgtagccttcatctgccgactccattcatccctcttgattcgcagaagaatcaacggaacgccacttagcaaacagaataaacaaattgcattaaacgaccaacccgtgccaatcgcattgaacagcggctgtgcaatgaccgcgcttacacatgacagactgtttcgcacgaggttattcaccgcgacgccgatgaaggaattcttcggtgtaaattctgtcagcatcgtcatggtgaaattggtgagaatcattccgccgagcccgtaaaagaagtttccgaggagctattatacagtagattagtccctgcttgaagctggaaggggaaggaagcgatagaatgaatgaacttaccgggaccaaccagaagtcgtgcttatcggccgtccatccccaccacaatagtgctccggggaagagaacacccgcaaggagacagttctcgcccagacgatcgaccgggtggaggatcaactcccccttatcattgtatcggccctcctttcgagcggtccgcgtcatgatataatcctaccagcggccgccaacgatagcaccgaaaagtaggcccaggccacccgggatatatgccacgccgacaaggatcgagctccaggagtatggtagaaaggcgaaggtgtcttcgatggaaacgcatatgaggtaatacgtagcgaagacaatgctagtgtaatagaccgtaataagaatgggagggtattgaaggagcttggtggcttccatgggctttaagaggaagtagagggctttcttgccggggctaatggcgtcgtttcggtgcttgtcgcggttctcctcgaggttggtggccatctccgggataaataataccatcactgcaaacactgcccagttatagatagccataaaccactgcgtgctgcgccaactccaacgcatggtgagcgcccctccgataatgggagcaagcatgggccccagcatgggaccaagcataaaagcgcccatagccttgccgtgctcttgcgtttcgaaaatgtcagaaatgttaccggcgctgactgcttgaatggaagcgctggaggcattcgcaaggagtcgcatggcaataaacatgccgatgttggggctgatagcggcgagaatgccgaagattccaagaaataagaagaatagtatgtatactagtcgacgaccatagagctcggctaggtatgaccaccacaagggggtgatggcgacagagagtgaaccaaaagcgatagacaagttcaccacagacacggtagtgtgcatatccttggcaatctctatcaggcaggctgtttgaaatcgaatatatcagtttcttgttctggctggggaaaatgatgacttatgaaaaagaacaccactactcagcggaaccaccaaccctcccatcgccacaataaaggtcaaagcccacttcatccccggggtataatgcgtgggactctgcaaggctgggacaaaacataaccactggaaagattccctgcaaacgtgttgcgagctattagtactgatttcttgtctgattccgagttctgccttggtaacatcttgcgtgggctcattgagcgaatctgttcgctcgtcctctggcgttgtttctgtgattgctggggattgcatcatgttcaatgctgctggagactcggcgctactgcatttatgtgcgagggacatgttggtcgctcgatactgaatgctcctgctgataagtcctcttggaggtatataaaattatcaaatccatggatccacctcggccgaggtgtggggcctcccgcttcgtacgaggctccacccgtggactgggcaaatatggagtaaccttatttaactgaggtacccctacctcggtaaaagaagtactaaaggcccaagaaaatctccgaagtggcatggagacaggaagagactgtctacgggatctgggctaaaacggccaaaaatctgcaatcccaacgagattacttggattttaagtgatttctcaaatccaaggccattgattgaatacttaccctcttatcgcagtatcggacgaggtcgtccagattcctctcaaattcgctggcaagagtctgagcagtgctcaataggctttgtagctccactaatgcttcagccgcatccacaggactgctgatgcgcaatttctttcgcgaagcatgtgtcacctgaataatacgcctgtaatattgaactgtggtgatccgcaggagatagatggtcatatcggtgaatttgggggcatccgagagcccggatgagggttccactccttcgatgagatcgacctcatccaggctgaggggtcgacgcgtatcgaagtccgactcatggattgaaggcgcaaaaccctgatcttcagccgcgcggaaatccaagtaacagatctgtgcccacaagcgacgatgcagctccacctgtacgacgtccatcgtccccagcagtagagctaaggggtcccggtgaagtccgtggaccgtcgctatccgaatggccagcccagtcaacggccatatcttccccatgtcatcttgaaccagtgtatcttcttgcgatcgcagctgtacgggcaaaggcgcctgactatgactggggacccaaaagagcaccgcctggtcagcgcatatcaccctctgttgccctcgaagttgcgttctcggaatcagatgcaaaattgaattccgacgtccggttttggctgaaccccgatgatggcaatgcgaagggatgcctaaccctcaccatcgagcgctctcgaccggaaattagaatcgaaaactgggagaagaaagagaacaggtgccatcgctcccaagtaacctgggttaccagaaaaggaacccggacgcacgtcacccaccatccgctcatcatcccctttgaaagtctatttctgcgccagtcaagtcggcccgaggagaaggatttagcgatcccagaacagcgactgcagataatcgcggagacgatttgggaagtccagggttggtagatttggttcgctctctttctttctttcttaagtaatactattggtccgggatcatacgaaagaggcttgatagaagaacaataatatgaaggctgagatcttatctgaacatgaattgtctttcaactatttcaaattctctactagcctgagtggcactcaggctttgacgatatcgaatccctcttcccagttatctagggctgcccgaatctccctgacataagcggggataccagcagagtagcacactggctcagaaaccttgccagggatgctaccacccatgtatgtcgactgtgttgtggggaagagagtcctgtcattgagctccacaacatgagtcttccacttatccgcagcctcaatcttgggattgatatacttgacaccgttgccctcgatcttggcaatggcgtcggaaatccaccggccctgcaccgcgaccgacgtggggccattgctcagaagcgtcggaccatgtgcgccatagatgtggaacatattggggtagccgctgacagtagtaccgaggtaggtcttcgcgcctggaatccattccttctcgagctcggcaccattgatgctcttcaggccgagctgggtcatgacaccggtaacaacatcctgtgactattagcgcgtgctgtctcatgagtgtatcaagaagaacttacaaatccagtcgcgacagcaacgacatcaagttcatggtgagttccgtcctcaagggtgatgcccgtctcggtaaactccttgatcgggttatttccgatgttaaccaggtgcaccgactcccgattgaactgctcgtagtagtctctttcaagacacggccgcttgataccgaagtaatgcggcatcttcagtggcgcaagcaaatccctcgcaacggggtcaccgatacgatcacgggtcttcttcacccagaaattgtacgactccttgttggcctcggcattgaacaagttatccttgtacacaccaacccaaaagcggaagccaccttccttccagacgctctcgaagaaggcctcgcgctcctcgggtgtgtcatcgaaggtgttgcgctcgtaccaatcatacaggaagcccgcaaagctggtctcgcggtaccggaacagctctggatagtttggcttgaggcgttcctgctcctcaacagtgaggtctcgcttgcgcatggggacggcgaggttaggggtgcgttgaaagactttgaggtcgccggcctcagggccccaagcctgcgtgatttgcactcccgaggcaccggtgccgatgacagcagcgcgcttgttcttcacctcgattttctcctcgggccagaaggaagaatggtgcacgatacccttgaatttatccatgccaggccacgggggaatgtaacgcttggcggcctaagtggttcattagtaggtcttgatttgactgatgggtgtaattgctcacaaagccggttccaaggacgagatacttggccttggtcgtgcgaccatcggcagtcttgatattccatttgccctcctttgtatcgaactgagctccaatcacgacggtgttgaaagagcagtccttcttgataccaactactttatccacgtgatcgaagtaatcacgcaggttttggtagttggggtagttgttgggccaattccacgtgttgtagacctcgggccaagagaactcgtactcggggacttcagagtcgacaccggcgccggggtagcaattccatcgccaggtgccacccatgtcgttgccggcctcgaaaatgaccgtcttcagaccgcgatcgcgaagggtcttgagcatgaaaacaccggctatctcgttagctaatgaatagatgaaccgtttactgtcaacttaccaaaaccagcaccgacgaccaaagcatcgacctcgagattgtccgcatatggcccagtcttgtcggtgtgaacagtcgagtagtccgtgagctcagtgttatacttcttcggcttggaggccgtctcctctttgctggccatgattggaatgacaaagtgttgtagttgtaactgaataagaagattgattgttggaatgtatgaagccttctaccccggacgcctcctcctacttatacatagcttcgttcacgccttactgctgatgttagcatatgttgtcaacattggaacaatatcatcacatagtcccatgacgcggagtacaggtaaccgcaatgcacccctccttcatgcgtccgcgtggcagacttttggggccaccgggacaatcctttttgtccaccaatttggtctcagaattaatacatcatgagttggaatctggcctctcaagagctccttgtcatggtggccacaaaaaactgctgtacaccacgtcacattagggctatcctcaacttgtcatcgtaaaatatactgcagctgtgattggtccccaccgaccgggaattgcggatccggaactgagacaaccctccagggttgagagcttccccgcattcggctccgcaatgcggttccgcaaagtatagtctccaaggttcgtattgccccggaattaagcgaactcctcggtaccacggggtaatgggaaagcgatcttccgcttgtttcgaactgttaaataagtcagtcccgcggtctccgccctgtgtttatcttaaatccgaactctcgtcaacaaacacatttcccccccacaatttccccacaatcgcctatccttccctacacaaacatcaacaacatgtctctaaatgcacaggtgcaatcgcatctccgcgatattgtagacaaagcttgtgaagaccaaaagtccggcattcctgggactacggtcgtggtcgttggcaaagatggcaacgaacttttcgctcactccgcgggtaagcgaggcgcgggatccgaagaccctatgaccctcgataccattttctggattgcatcttgtactaaggtggtggttggtcttgcttgcatgcaactggttgagcaaggaattctcaagctggatgatgcggagcagacagagggtctttgccctgaattgaagagtctcaaggttctgctgccagacggtagttttgaggaaaagaagaatgggatcaccctgcgcatgctcttatctcatactgctggattcggctatacctttttcaatgagagactgagacagtggtcgtacccgatcggcgcggatgagttctctgggcggattgaagatatgaagatgcctctgctattccagcccggtgaaggttggcaatatggtgtaagtatgatctttcggaatcacgaaacgcattgctaatgagtacaggttggtatcgactgggcgggaatcgcactggaacgcgcaactggcctgacgctcaacgaatacctacaaaagaacatcttcctgccccttggaattaagaacatgtccatgatcccaagccatgacatgcgtcagaagctggcatacatgaatcaacgaaacccagatgggactctgaggccccgagaccatcctcttcgggcgcctctagtggttgatctggagaacaaggctgaagtcgccagggtgttcaatagcggtggtgcgggtatatttgcaaagccacaggattactgcagtaagtcgcgggtagcttcgatcccaagaaaccacacactaacttatctccgcagaggtcctcgctgtgctgttgaatgatggaacgtgccctaaaacgggcagcaagttgcttcgcaaggagaccgtcgacgaaatgttctctaaccagatccctcagttccccaactacagccgtcaaagcatcccagatgcaaagccggacctgaccaaccccgttcctgaactgtacccagttgctgggaacccaccacagggttggggcctcactttcatgctgagcaacggcggtccaacagggcggtcgactagcacagggcactgggctgggctcccgaatttgtggtggtgggcggacagggagaagggagttgcggggattgtttgtacacagattctgccatttgtggaccttaatgtgcttgggctatggggaacagttgaggctgagatatacaaagccctcggtaaggcttgatgtgggagacattgttttttatttaccagccttcacatgtttcaggagggatacaggtaatttacccagaggtcatgtgaccgggatgttctgaagatgttcaccggtgtatatttgtaattagtcagcatgtcacgggtccagttgaaattctccattttgtcagccgctgattggtgcatattaatttaattcctatcagattcagctagcccgagttgtggagagtaatatattttccttctcctctcctatgtgtcatttacttgcaaaaattcctgtagtcaacccatgagttattctcatcactttcagataaaaacagacaataccattcagcattcatggatgtacggcggactaagggaaatccggggaatgcggggtcgaacgccccagaaaatagaaaaaaaccctaaatatgaagatccgttgcaatgcaggtttacgtggttcgttccccgctttttgacgacatctcagattctcacagcccctgggcaaaacgagaaagaaggaatagaaatcaaccacagcggtcgatatgtccgtccagaaacgaagcacgacacttgcacaaggatccagatccaggcgtcagtaccgctcttgcgaccaatgcagaaaatccaagcgagcatgcgatgcaccatgcctggatccgactagacgaacagtggttaacaattttgacggccagcgatcaccttgttcctactgtgtcagaacaaataaacgctgtactatggaatgggcccgatcacagactcagtctgcgctgagaacgcctcgccaatctcattctgggtatgggagtcgagatcttctcttcccatggaaatcaaatgagctccagattgaaaccggacctggaacatggagcaatttactcgatccaaattatacgcgggaggttatggattgggactcggagtcagcaaacgtggatttgtctgggtcgttggtcgattgtacttcaacgctgttcagttccatgctcaacgagcccgagacctcccaggaaaatgttcaggcggagattcctgacgcattgatgcctgcacggtctgtgtctgatctcattccaccatacttccctatttccccaaacacctccatgcaaccaccctcggatctcgaacttgatccaatgtatcaacagatgtggctggcctcccaggcttctcagacatatagtagcctcggatccgccccatcccaaagcccgcggcgaccgagtgactccgcttggatgtctgccaaccagcaatcctccgactggcccagcccgcaaagctcactctctccgttttccatcgaccaacaaatgattaacacatccaactcccatttaacttcagtcaacctgctgcaaatatatcacgatgtgctagagcataacctgtcgtgttggctaagcgatatgacttgtccctaccaacttggctcacgaaatacccctcagcttgtacccgaattgggatattcacggtctaatatgatataccagcgcacgatcaggctcgatcgcgtcgcacaatcttccaatcttctccagctgacacgcgccgaggaccaggccgcctccaaagctttgcaccttgcaatcatggcatttgctacgcagtgggcacagggcagttaccgacaccgcgagaaatatccgaccaggtgtctcgacggtggagaggacgaaatcgccaatggcgtcgccgacgagttcgatcgcattcttcagaaccacttttgggagcaggcgcagcgcgcgctccaacaagtcgccggtttggagtcgtatagagttacatgggccgagctgatcttcggcttcacacaaaggccgtggaatcccgacactcggccttctagacagcggatgcaagaacaaggctccgagtttgccaccgaatccgtcttgacaaagttacacgatataatacacaaagatggaccaccagtatacatggagagagcagctcggaaaatgcacgccttgaaatttcgctgcgacgtgctcgaaaagggcctcggcaagccgtacggcagtcgcaagaaagggacccatggcattgaagccatgagtgcggaagagcgagggacaattggcctgctctactggatggctatcatgtgtgacaccctctcgtcgtctataaacgaacgacccgtcgtggtgctggatcaggactgcgagcacgaacggcaaaaagagatccagcaagcagggaatatcgacaaatctatcggaagaagtcgatggaatctcgatatctttttgcaaggaaacctcaagcagatgcgccgaacgcactggccctgttcctatgaggctgcagctgaagacgtgatcaagtcagcgccagtcaaggttcttctattccgccacctgtcttacctacaaaacgcggttcgcaagagtgttcctgaagagcagatcgaggacattgtccgcatggcgatgttgttatatgaatactggaatagaacgcatggcgccttcttcgatgaactagtgcagaactaccatgcggttccgcagcgcatacggggctggttcctctgtatctctgcgcactggaaccttgctgctcttatgtttgccgacctgctagaatttatcgacgagaattccctaggcgtggatggtgcaactcgtatcaccggtcaagtggcgaggagaattaggatgcacagcgccagggaactatcaattctggcaagggtcggtacgccgtctaccagaaatagtgataacctttgtgtgccgcagatgtcagacttccaccacgctgtcaaggagagcacgcttttgaccgagccatggacgatagttttaatcagagcatttaccaaagcttctatggtctttctaggtgaagcagatgagtccttgcggtacgacggaattattctcgggcagagcagtcatgatttcgaggggaatatggagcaggccgaggattgtatgaaggggctgtggctactaggtaaaaagtcggatatggcacgggagattgccgagatcctttcactagcgttgagagaattgcggaagaggtgtgttatatagcttccacaattctgcaatcaacttcatattcactaatggacgcattttacagtaaggtggccgctcttttaccggttgggttgtcatagtagacgattgcggtgaatgatactaagggactaatgattgacgggcactacgtctataaataagcctctgttctgtatcgcgggagtattatcaaagtacgagatctcccttgatttggaaacaagcacctgcgattataaacctttaattggggtattctaggtgaggttcatatattacagttcgctaaattactatgatacatccatctcgatatcaaaatatgtgttaaatgccccaagaggtcaacgattgagttgctcctgtctttcacagtctgggccttcaagaagactttgggcagagtcgcccattgttgttccacgagtaaggcaccgggtcaagagtctgaacctcccagtcctcagcaccaacggcagtcagggcaaagaaaagacccgtaggatcatacttctgcttgagcgcatagagacgagggtagttaacaccgtaaaaggcatcctggagattcggctcgacaagatcggcctcgctcatgtaggcacctgagtctggggcaatttcacgtagaacgtccatccactcagtcacgaagcgcgatgagctctccaccacatcccaggaggaggtgaagttccattcggaaccgacaataacgtgtgagagggcatcgcgccatgcagggagcacggcattgtctgtggggggctcagcggcaatgccggtgccgctgatgtggaagccggcaatgaagagaccctataacatgtcagaaattatttcaaaaggggagagattatgcatttgtgtatgcatatatgacatacctgggtgatagcatccttgtaggcggcccaggtttgattgcggagatcatcgctctggaaaacgctgcgggggagcaggcgagaggcagtcttcacgacatcggttccaacgtattcctgagggaaggccacggcccaggcatcatggctggaagaaagttttagctgggatgtagatgcacagattttgcaaggaacggggagaactcagacgtacaagttatccgcgtggttgtaccacggagtgaaggagatattaaggcttttgagggtatcaaaccatggagccaggagtgcctccgtctgggcaacagtcatgttgggtgcgacgaaggattccatacggaaataatagtcaggatcaccggcatacgtcgtaccaatcaaagcatcggaagcaccgatatagaagtaaccgtaggtgccagcatcaacaaaagtctcaaaattgtcgaggtaggactgaatagcagcccagaaagcgtccggaccaggagtgtcgctgattgtgaaattgaaggtcacagtagtcgtctgcagctgaggtagggccttgactgtaagagaggtgacgactccaatggtactaccaccaccaccgcgaagcatccagaagacttccgagttctcagtggaggtggcagtgataaatcttccatctgccagaacaactaaacagagttaatagggagattctttgcacaaatttctcatagaaaaagagacttaccttgcatagccagaacctgatcggccgccagaccgtacatactggaaaggggagagtggccaccaccagcaacgtagccaccgcccaaaccgacagtgacagcttctccgccaacaaccgagtggccgagggtcttagcaaactcataagcctcatggacttggataccggagccaaacttaatggccggaccaacatagccattggcagccttaaagttcgggagatactccttgtccttgaggtggtgggtccaaatggagagagcacccttgccggaggacttgccattgaaatcatgtccagtattcttgaccactagtcgcaagttcaagttacgggcaaagttgaccgctagctggatctgagccacggtggatacgttcactgcatacgtcggatatgcgccctgcgtgcagctggcagtatagttgaacggtgatggcaggcacgagcggccttggtatagcggcgacatcaccgaggtaggatcttccatatgcaggtccgagctgagccagtcagctgtgacgcttgcgcacttggcggcatcgtactgcggccagtctggatagcagtaggatgccaggggcaccgctttgatcaggctgccgccaagcaagatatcgaagatgtcccaaattggagccaccggccaccaggagtccccgggcattagcttgcagctacgatgagcactcctcttgagtaccgtggagttgctcgcaaatgcgaacatgttagcgaccgtgctattctgcaatgccgccgacacatcagagaggacaccttcggtcaactgcacttcctcattttggaataacgaaggtgccgaattggccgtggccaccaccgtagttgctgcttctgtgagtgatgcggtcgatatcgcctgagcgagcgaagtgctcgcgaggagagtaactccccacatgcccttcatatcggaaatttagcaagacaattccaagaatcaaaaagaaagagagacagaaaagggctaacgagtcaaggcaaacgatatgaccaactccctgctaaaaatgtggacaaaagtgctgcttaaatatatcttctataggggcacgagggacccgagaacgacagagccataagagctttcgcgactatcgggcttgtggcgctatattttgattaaaatatctcggtcaatttattcttttggtgctatagccgatgcgatgaaagccattgtacactaagtgactagttgcataagttagccagctaggcgcaattatttcgcttaccaccgtctagcttcccacaaaacacaaaatcaagaaagtgctctctatttctggggtttctccgatttgattcaaagatactgacatatttggtataaaagcaatgtgttcgttcgtcaaatcagttttctgatacctttagtttaagtgaggccgattttggcccccaatatagttccccagcctaggccctaagtctttacatgaaacttgactaacttgattgcattgaattataatagctcgtaagccatacgctagtctattgcaaggctccacgaccgcaactaggcatataatatagagaagacggcctaattggatcacaattactccgcacccgaggccttactgtgtgctcagtaagcttcacagggataaaagggcgtgcgaaagttactttctcgggcgatgcagtttaatatatgcgagtgagagtttgatgccggttgcagggatgttgcttatacttaatgtaaactggcgcactgcccagctgagtcggattcttcttgtcaaaacaaaaggtgacgggcgctgcttttttgtctacgagatgattactaggcgagattatgggttctaatgataacttgcaatcgcaggccatcggcctgatctttgcctttccgtgcttcgctagtgcagctgtggctctacggctttacagccgcacgttgacgaaatcgtttgccgcaggtcagttcaatgatccaattcctcttcgtttgtgggttccatgaaattaatagagaatagatgactgggttatttgtctcgcgatagtgagtaccgcaaccactctaagaaagtgcccggaggattgacagaggcagatcatgtattgggcagagacatttacgtcttataaaggtaggatatgaacagcaaggatactccagcgcatatataactcatgaagctaatcatctcttagtgatcatttatacatacattggatataacgtctgggatataccgaatgactatcccgccattctcggcagcaaatatacctacgcggtgggtggaatatatcctttctcagcatatttgttcccgcttgctaacgaaatagaccgaactcctctacaatcccattttagccctcgtcaagacctccatcctactcttcctgcttcgtctaaccggccagaaacactcagtacgcctggccatctggggtctcttaattttcaacggtatcgccgccatcactacattctttatcactgttctgcattgcatcccagttgccgctaattgggatgcggcttcatatcccaatgcgaaatgtcttgactttgcaaacttcgtcaccggcacgggctcagtttccattctcacggatatccttgccttaatactacccacctggatcgtatatcgtctgcagatgcaacggagacagaagttgatgctgattggcattctgtccttgggtcttctgtgagtagctcaaccgaacgtcttctttcctcatcaatctgatactaataaataaagaactgtggcggctggcattatacgactcattctccttgatcatttcgaccgtcatatgccggagaattacacgcactcggtcctcttttgtgtgtccactatcgaagttggattatcgtttatcgctgcatgtgctccctcgtttaagccgctcgttacccggctggtcccgaagctcttcggctccagccgcaccggccgggataacnnnnnnnnnnnnnnnnnnnnnnnnnnnnnnnnnnnnnnnnnnnnnnnnnnnnnnnnnnnnnnnnnnnnnnnnnnnnnnnnnnnnnnnnnnnnnnnnnnnnnnnnnnnnnnnnnnnnnnnnnnnnnnnnnnnnnnnnnnnnnnnnnnnnnnctcttcgcccccagccgcaccggccggtataacagctccagtaaccggttgggctacaacctcgaggacacgtcaaacttcacacgccgtacgcacgaccagaccgtcatcgttgaagctggagatggcgagatcggccacagtcacacgaaattgaaagccgataatgcgatcaccatgaccacggaaatggaggttacgtggggtcggtctaattgcgaggagcaggataccagcagtacggagagtcttgtctacggaaaggggagtagcaggcgttcgaaatgagtttggaagaatattgctttatttgttccatagatgtactctggctcgattaaaatatacgactgtaagaatgaagcttcttgagctgtgtaggttgtaatagttgcaaccgaccatcaatacaactggcagaaagggggacataccgctttcatagcgaccgccttcgagcggggtctatctttcgaggccatcccagaaatagtaaacatccatcagtggttttacgcattggataagtttcccatcagaactgagaagcgtctcgtctgagttcgtatcatcgaatcaagagcacaatccagtccctcttctcctcagctcggagttgtttctggtcgggtgtgcaccctggtcgtctgcggaaggagtgctgatccactgtgggtgtgggtcagactccggtctgagaccactctttagatagaggtaggctgtgtgaatataagacccattacctacatatatgtatcatgtatgtagccacaacattgatggaaagaccaagggttgccagcatagtattccaaaagtgctgggcaataatgctgcgctacctaagccataaaagctggagagacctagacaaaaatgcatcatttgatgtcattagtagtaaataacttacctaccaaaatagttaatcttgtgcctgctgctatcataggaacaaatgctgcctgtgtcttgcatgagatggtatctgtgacaaaatagaccagcagcattagctcaggctccaacctgcacctagccagaagtggctttcacagctgccaactcccgccacaaactagtttgcttgtagcaaaaagtacaatgccgcgaggttcaaaccaaccattctcatcatttttacccatgctgaatcaacatggccactctcgaatctctcaagtgtgctcttaggcaaaaggccaccgcaacggggtcatccccgaatcagccattatcagacatccagtacaacgctggcctcgatatcttactgcagggtccaacataccaagacttcatcatccctcagatctctcggctgctcgctcctctcttggactcgaatatccagatatcggtgctagaaataggacccggctcaaagagcgtatttggatatctgtctggtcgtctgaggcggaaaatcaggaaatacactgcattcgagcccaatggcctgcttgctacagggttggaaaaatggctttgctcgaaatcagaggcagagtccccgctgccctgtctggaaagctcgcctgatgtccagcgaattctattcggtgtagagagcgacacgaatagtactgatacgcgtgacaaggacgaaaagtttgatgttatcctatcttgtcacggcatgcatgacatgatgccaaaaaccaggttcatcggacaagcgctagaaatgctggttaagcaacccgaaggaggaatggtggtgatttttcatcgcgacttgaccctacacctcgacggattagcgtgccatcgtaccgcttgttttcctatgggagctgttcgcgtggctaatagtgatgagatactggattcttttgctcctttcatcgcagggtttgccatgcgggatgtggaggcggacaaggatacccgaattgaatggcgtgaggtgtgccgcgccttgggccgctcggaggctcacccagaccatctattattcagctcgcccaatatcatgtcggccttcacccaccatgcgaccgcattgccggagctgacagcacaggtgccattgttggaaggaggcaaagctgttaagaaccgagaggctcgtcttcaccaccccgcctcgactgttaggccgacagaggtacgacaaattcagcagtgtgttaaatgggctctgaagcacggtgctaatttgaccgtcgttggcgggggtcacagcggccactgcctatgtcccaacgtcgtttcggtcgacatgagcgcctttgaacaagtgcatattatcacagccgaggatagtggactagaatctggacttgattctgttcccttggttgtcgccgaggcgggctgcaaggtaggggatattgtccgcaagaccatggcagccggcatgacagtgcccttaggggcccgcccaagtgtaggcgcggggctatggctacaaggcggcatcgggcacctggctaggatatatgggctcgcgtgtgacgccatcgtcggtgccgtgatggtcagcgtcgactctagccaagccttttgcatcggccgtgtaccaagccaacactggccggccggtgccgtgcgcccagaaaacgaagccgatctgttatgggcgataaaaggcgctggaaccaacttcggtatcgtagtcagcgttactttccaggcttacgcggctccgatgttctcgattcgaaattgggttgtcccgctgagtgacaatctcgaagcgcagggcaggctcagcaattttgataaattagtcgcgaggcttcctcggaactattctatggacgcatatctgtattgggacctcggaaagttgcatcttggcgtgaccatgtttgaatcttccacgaacgggcgcacctctggaacatccatctccacgcccacgccagcagcaacacttttcgagcgggaagacaaatttcaagtcgtggactgcgtcggcttgtttgacgccgatatgtacatgtccggaatgcacagtgggcagaccagcaccaatacatcagcattcaagcgatgtttattcttaaaaagtattggcgtaatgaatgtcgccaaaatattgctggcagccgttgagactcgccccacgccactgtgctatctccatctgctacaaggtggcggagctatcagtgacgtggcggccgatgcgactgctttcggttgtcgagactgggactttgcctgcgtgatcactggcgtctggccacgcgaccaagatggaaccgaagtcgcacaagccgccgtacggtgggtatataaggtcgctagcgacttgttgcccacgagtagcggagtttacggcgcagacctggggccggaccctagagacgccgcgctggcggccaaggcttttggatcgaaccggccacgcctggctcgcctcaagcgcagctcggatccgcataatgtgctagcttacacctgcccgcttcctaaagcgcccatagaacataagcttgtcattctagtcacaggtgtaagcggcgccggtaaggattattgcgccgacatctgggtctcggtattccttgaacacacccagaaaatgattatggcgcgcgcagtcagcattagcgatgcgaccaagcgagaatacgcggcggccactggtgccgacttcaaccgcctgcttcaagaccgtggctataaagaggaacatcggccagcgttgacagcgttcttccagaaccaagtgcgacatcgacctcggttgccagaggagcattttctaaatgtggtaaacggtgccggagacgtacatgtgctgctaatcaccggaatgagagatgaggcgccagttgcagccttctcgcctttggtgccaggcagcagactgctcgaggtccgggtgaacagtagcaaagcggcacggcttgcccgccgaggctgccatggcggtgattctgatcatggtgacaaagagaatggcagccgccctggcctcgtcttcaataatgacgcgaccggaaacgacgcggccagaaggtttgccgaagaatacctgattcgcttcatcgatggagacctccagcgactagccaacatggtgcgtccagtacctgactttccacgcccgggcgttgaattccgccatgtgctcaacatctgccagcagccgggtgggctagccctgtgcacctctctgctacagactcacttcactggtgaatgggccaaggttgacgtgatagtgagttgtgagaccggcggcttcatctatgcgtcggcgttggcctcgcgggttgatgtgcctttggtgctgattcgggaagcagggaaactgccgccacccaccgtttccgtcctcaagtctacttcgcatatctcttcgacatccagttcaaatgagaataggattgagatagaacaggatttgatccctagaggtgcttcggtagtggttgtggatgatgtgctctccacggggaatacactctgtgcggtgctacagctcctaggtgaagttggcatcgctgatgtcagcgttatggtcgtggctgagttccctgttcatcgcggtcgggaagggttgcgccagcgtggatttggcgtcaatgtccaaagccttttggtgtttgacggcgcctaggaaaggcgagaatgttggaatgtggaatgcagattgttcttctgctaattgaattttgctaaatttgctagtttgatctacaacatcctaatcgtcttattctctcgatgccttgacaagtcaattgacataatttctatctaatcactggtagatcatcgttggaatagtgcgtaatatgtgaatgttgtggttgtgctccaactgtttaccacgggggtcgtgagctaccatctccgtgactccgctactccgcagttgatcagcatcttcaacaactcaaccatgtacgactcctatcgtcagtatttccatcatgctcacttgtatatatgcaaatagctaacactgttctaggtccccaccctctccttgcccaggtcccactgaccgtttcacccttcatcaacctccccacctccgtcacattaccctacacgtacaaatctgttccctcgtctctacccccgtcagtgacaatcgatccaaacagcccggatggtaaggcccggtatgtcgtctccccaagcggtgagcacgcagctcatccagacgatgtcctcgccgcatgccactccctcgaacaacatttgaatcaggctcgcgccaacgcggagcaagcgatcaacacatggaaagaggctataaaacaacgcgagctagcggaaaagagacgcctcgctcctgggtggctcgaccgcgaggaaaagctccttcagcctagccggaccaatacctcccctgacgcaaatggcgatgcccctacaagccttttggatagttcttcccctgaccagggctcttcgcagttaccgactatggttccgcacaacgatggggaggagctagatagggcgttcggtggtctaggtgtgaaatgaggaaggatggtcttgcaagagagttaatccctcattgctctttacatcacaggagtgcttgggaaccgaattctcaatgtggcacagtggatcactctctaaaataatgtctctatacactatgtttcgggcggacttccagcgctgggctcttcgaaggccttgtcaaacagtttataatctcccaagtccgcgacatgcgcttcgccgtggtgctagcgggactttgactgtcagtgctaagattatgttgtgctagaagagtcgagtggatagggtgaatgatttcacaattgttcctttgactagctacctatggactatcatctggaggcagttattgctatgaaaatatggtatatcatgtattcaggatctggcaataatgctgcatataagattcctatatgcgaatgatcaaatacaactgtgtgtttaacaaaagtgcttctgacgctggttatatatatctaccaggtgagttcctatttcttgctttttctttcttatgccgatcatcttgaataagtactcttcttaagatcttgctcgtcacaatagcatctatattaagatgaacttggtatctgtatctcgtctacgccttcacgccctcggtttacttcctgcgataagggtgacttatctttatcaggagttaccatagtaactgtatacaccgtatatttgttaaattatatagacaaattggcagaaaggctagtgagtgtgctgatccacgcggtgtctggcaacaatcccaactgcggctcataagctcgcggaaaagctccaccccgcgcgccggaagctctttttcattccatcatctcgtcatatcattcaatcaattttctccctctttacaattaaacacagactccaacatggaggtcattcgcagctcccccgaagcctcctccttcgtgccactggctgaacaccagtcgcgcaccccgagctccttctactccggacccccagtattgtactaccacagccagcgctgcaagatcgtcattctcgagcgcgagctactcgccgccccagcactgaatgccctgcgcggccaggaagctaccaacaacgccgccctaagccatgaccagcaggacggcgacgagaaggagatcgcaatctcaggcgtggatacctgggtaacatccgagtgagtttagtctattaattttccctcccatccgaaaaccaggacaccaactgactaattccatcacccaacagcaagttcctgctcttctcccccgcagcatcaacgggcgtgtcgatcccctacccctcgatctccctgcatgcactccaacgcctacgcgtcccagactccgatgccgaagtccagggcctgtacatgcaggtcgcgacgccggatgcgggtgcgccctctgccgacgacgaagaggaatgtctcacaatgacagtggtgctgcccgccgacgccgcgctagcagagcccgtggagcgggagacggacacacccacgcagcagctttacgacgctgtctcggcgtgctccaacctacacccggatcctcttgaccagggcgacgaggatgatggggatgggcctcggttcgtttcggcggaggagcacgatggtgtcttccagcttggaaatggtggtttgcctccgcctgttgatggcagctctgggtggatcactgcggacaatatggatcagttctttgatgcagatgggaattggattgctgctggtgagccgccttctttcccgcttgggcctggcgctgggactgttcgggctcgggagggcgagaatggagtcgaagagaatggtgttgaggatgagacgaagtggcgcaagacggattgattgtgatcagactgttttaaggaagatatgagataccgcaggattggcgttcaaattacttgagtagttacatagtaggctaccaattcattttactaagggtcattattccaaggatacattcgtacatagggaagggttggattggatttctactaataatttcgtctttctttcatgaatattaacctcataaaacacacaccaaacataaagacagaagaaaagggcagaacatgaggcgacaagcaaaataagaagtaatagaacaaataaaaacaggtagaagaaaatgaccccgaagcttttgcgccagtatcaggtactgcacagtaaaaagaaatcaaaacaaatcaaaagaaaactgtcgctttcaaagtccacaaaagacagcaggattaatctattcccgtaggaatccatcgccatcgtaaaggctagcaggtgtggcagttccaattcccagtccgagccctttaccagtaggagtagtcatgcctcggcggggagaagtaggagtggggggtgtatggtggctcgacatgtgaggcggtagttgttggttggttggcatggaacggggtgcaccgttcttgccacgggtaggggaggagttaggcgtgcggaacgacccaattgggggctgcatgggggttcgaggataggaggtgggctggttagaatcctcaaagatagtgacgtggtcttggaccattgaggaccggcgggggccgtagaatggagaagcaccaataggacccagcccgtcatccaggcgagatattgaagcacgatcttggcggaatgcgcgatccggagaaccgttgctcatgcgttggtgtgagtctgtggatctccgccagtcactaccttctgttcctgtgatactcatgacgaaagggaggcggctgggagaggccaaggggctgtctagcgtatgatgggaggatgctaaggaaatgcaagttgactgccttcgagctggactgacgccgggttggttccgaggcccctttactgctgaccgtcgtgggctgccaatgccaagagagttttcgtggtatggctcggggagctcccatacagggggcactctttcgggagagggagtgttggtgagagaggtgccgtgagacgaagggagagatgtgaacagttcagggagagcgcgagtgtttgcgaatggagacttattggccatggaagatgaaacacggtttctcttcttgcaaggactgtcatcgtacattggacgctgcggctcctcgaccagtggcccgagggagcctagactgggcttgccatgtcgactgccgtacttgctgcgccttgaagaggacagaggggatgctgcacttggtggcaacgaatgcatgggttttgttggggtgttgattgagatctcacggagatccagctcctccatcttgtcgaagtcttctggttcctcttcgacagtgggagaaaacgtcgatgacccaaatgtcatgggtggatggatagagatacggacacagttttgacgtcggtgacctttgcgttgtggatttccacccttgagtgcagagggaagattgccctttagagagagactggtacgctgcatcggacttggtggcttggtgttgcctggtgatctcacctgatggaacaaagtcccgcccccgggtgagccaacgtagaaggggtcattatccatttcgaaattatcgtagccgatgctgtttcggaactgattgccgtatgggacagaggatatgtgggagcccgatgatcgccaggacgagactgaattttgatgtcccaaacgcccaaccgtcccagaccgcaaggaagcatgtcttgaagggggatgaaatgaagacatagagtcagtccgacgtggagcaccaccaaaacggtcgatggaggcgcccgagtggtgagtcgtcaaacttcgtcgaggtgacgggcacacagatttatggcgaggttcagttgtcgaagaggagcggatagggaagttgtgcataggcgggatggaggtgtttgtggcaataaagctcctccggccatccttaaccccaacgtcggcagcactgaaaggtacaaacgtgccagagggcaatacgggtgaggtctgatcggtgtcagccgacctagaaccagttctgccgtcatccaaaattgagctattggtggtatccagactcatagaggaaagtctcatcacagagtcattcctagcatagctgaatctgtctggagggtatgcagttggtggaggaggaggtaccgggtgaccaggcatcatcccggcagtttgactagcaatacttcccccgcgaacacgactaggagaatcttcaatgttgtttgaattcaacatgccagacgagttacggtcttttgaaacaggaaatagacctgactgctctcgtactggagggggtttcacacctagatggaacccagcttcatcctcgttgagatctggcgtttgtgttggggttctttctgctggcaattccagaatcccttcgaccgccgaaagtggggcgtcttctttcgatattgatattgatgctttaggtggtgggctcggaagatcgttcgattcactcaatgtggccaacgagctcatgcgtttgtgagacaatcgtgataggcgcttggaacgagatcgagaaagggaattgcggaaagatcgtgctttctcggtgaccggtaaagaagattccgagtcatttttcagacgaagcaaactttctctcgacgttaattgtccccattccgacggtttaccatatggaagctgcccatgtgcccttaagacgcttccctctgcccggctcagttcagtcaaggtatccacctggcaagattgcaagcgactgcgtggtctctgcgtaaagcccaccagtcgtattgcatggcgctccttgcgatacctgacccagacaacaacgctgaccactgaaacggcaatgaagacggccgcactacaagcggctatcgcaatgacggcgggcagcgccagcatgctcgcctgctaaagtgtaactgggctgattccgatgctgtatggacacaataagggggtgtggtctttagaattcctcatccgtgaatagaggattggtcgtcaacatgcgatgtcgcgaagtatcgctatatcaaaacggccacaacgaggcttcacagactcctcatggaacacaacaaagtctcacaggaataagaaacaacgaagtttactggcattccatcaagggagcgccaattgttatgggaacattgattctagccgaggaatgctaattcatcaccaccgggtgcaaagaatgttggcggccacactacccccttcgaccatgtttcaacatggacagcgccacgaatataatcatgccagtagggcatctgaagaccagtatttggtggtgggaatgtatttctaatgcctccaaccctggtttatacttgacaagaacttatcgctcttccaagtaccctcttcctaccttttctttgacatctctgttcgatggaatctagggtgccttttcagacatatttgtcataactacagagtagataaatggctcacgcacccatgaaagtgttcaaccatgacgcgttccactggtcgcctttgacgatatttacgaccaaccaacaatatcagtgcgcccttggtcaacgctattattgttcggataagtgatctattttgattccgaccgagtggcttcggcagtcccggattatatatattaatggtataccggttggattgtagagtgatcatgcattggataatcaccccgtggacaaatggccaggttcagttggttcctactgatagcagagcttcgaatcttcacagtttccaatcattgccagaaaagctagttcaagcatctgtactccgtactcctgtccgcgatcgggagtcggaatggaggacctcggcatcttggccattccccagaagaagggtcaagtcagtaatatttaagagattgatcttctatagctggaacgatatgtttcgatgcgattccaattgtatatctctaggggaagtgcagagtggagatcccacgtcgcatttccccgccggatatgcccaggtgggaatagcctctccaatctttaatagacctgaccgtgttgaacaggtctacctaacagcagagagttatgatagatcccattatatcctgtcaaatgacgactctgaatagtgtcattatccactatgtacaggaactagcgccattgaggcacaatgcgaggatccccaccaaggtctatacatagtagtgaatagccccgccagcacgtcgctcaccgtgtatcagttagggattccttgatttgcccctcacaggctctctatttaagtgctcccccgagcttgctattttccccttcccttttctcatcttctctctatctactcttcgtttgctacaatggctgctaaccctgtgactaaaaatggactctttgtccacaacaataccactgctcctgagcattccaacctcatgggcatgttctctctcaagggaaagactgccattgttaccggtgctggcgctggtatcggtctagccgttgctcagggtctggccgaggccggtgcaaatgtggccctgtggtataatagcaaccctaagtgcattgaaagggctgccgagatcgccgagcagtacggtgttcagagcgcgtagaatttccgcaatgtgattggttttatatcattctaacaagatttattttgcagccaaggcttatcaggttcaggttaccgacgcaaaggctgtcgagaacgccgtgaacgacgttgtcaaagaattcaatggccgtctcgacgtttttattgctaacgccggtattccatggactcagggccccatggtcgacggtcccctcacccactaccgcgatgtaatctccactgatctcgacggtactttttactgtgccagggccgccgctgagcactggcgccgccagaaggaagaaggaaccgatgccaacggtaacaaactcaccaacttcacatacggcagcttcgttgctactgcctctatgagcggtcatatcgtcaacttcccccagatgcagactgcctataatgccgctaaggttgcggtcattcatctttgtaagttgttattcagactagatgggctccgtcgctctactaacgcctttccaggcaagtctcttgctgtcgaatgggtccgctttgctcgcgccaactccgtatcccccggttacattgcgactgagatctccaactttgtggctgaagacaccaagaatatctggcgcgataagatcccgatgggccgtgaaggccaagcccaggaactgaagggtgcctacctctaccttgcctccgatgcttccagctacaccaccggtgccgatatcatcgttgacgggggctactgcgcaccttaaacccgaattaaaagcagggtctttcgtatgaagcatgaattttggacagcgatttgatttgaatgtgatgatagacgaacgtaacgatgaacagtttagatggacgagtctgaatcaaaatattttatttgcaacatccccctcatcatgtctagaatgactcgcccggtaaaatggtgccagcgatgccagatcccgacggatgcattttcccatcaccggcacgaccagtccatttctgcttgtgcgcgattgccgagccaatgacgctatgagactatgccgtccttgtgggaataatggctcaatccctgcatggcgttgattaaccccaccaatgtcatctggaatgcgctctacccccgcgtgacagcgctcatacaacatagaccgatatgaccctgtcggttgctctgatcaaaacacctacgagctacgaaataaacagcaacatgaatgtaactatcaccaggggtaaaataactcttctttcttaaacatcaacttcaattacgacacaggaaagtagtatcatcgctccgctcatcatgcgctcggacattccgccaagcctttggatgctgtacggagtatctgtcctgcaaagcctcatatgctcactagccccttattcgtcaagctcgggagtaacataggcgaagattccctgggatgtccactcgacaacctcatccaaccaaaccaccggtcccccttgttccgggtgctcaacgttaaaatagggacgttcgacttggaattcccagatggggatatcgtcgactgggtagtgttcgtcatcggagtcggaccagtcagagccatactcatcggagtcatactcttcggagccataatcgtcgacagacccggggggtggactgaccgtggagaactgggctctatccgcaaagttggggtgctgcggacggtttgagtctctcaaattgggactgccacttccaatgtcgtcatcgctttctgcgattctattggctgtgtcaagaacattgttttcgccgggtcgatgatggttgcgtgctggagtcgccaggtgaggatgttgttcgtcttcatcgttgggatcggggttgattggctcgtactctgccaaaggtatgcggtcttggtcttgattgacatgattacggttgaagagattgcgtgcaataaattggtacacagggaggatgatgcgacgatggcaggcacctaggtgctgcatgatcgaagcattgtagacggcaacgacgaacaggaatgagagtgtcaggcaaatcgccggaaaggcaagagaagcctctgccatgatgactttgttgattgcagatgtccgtagagccgaacagacgatatggaagatgaaaaatgcatatggatttggggaggaaaaagggaagaagcaccgcgcgacgaaggtcatcaaaatcgacatctaacaactactgtgaattgatgaacaataggctgatgggattttcaaactgccagagaatatctagatatattcaataacaagatttaactattttcattagttgcatctactcttgcatctgcttatctatacaaagtgatatcaataagcaataagatggcaaatccttatactcgatcactgacatcaacatataggtatccaagttacattgcaaaagtatcatagagcaaacttctagtttcacaagtattacttgacccgatgatctcctagagtcacaatattcattcacgatactcagtcacgccgcagcttaattggcgactttcccatatgaccttgcacgcccacacgtcataagcaaatcttgcttatgaatcatataggaaagccagctcgacatttcctatatttagattggtgctacagctctcctatcaacgttagctcaagcataggatacatatctaggtatctcattgtgcagtgagactttcaccattcattgtttactactctactttctttctttggctcaaatcgatgggcttgaaactaagcatctttgtttatcctgatttaaattagaatcatggaatccattgtttcctctcttcctttgtccatgacgttgacacaaaggcctttcatgcattgtataagtgcatgccaaactgcatcatccttccctcccatcttttccacctctcaatcagatcacaaatttctacatatacattactccaatcatcccgttgaccttactaggtgtgttctcatacagccatctacaatgggaattccaacacgaggagataagaaccgaattgttaagcgcaagttcacaccaagaaaaacctggacagaagctgttaaggaaaatattgtacagttcttcatttccaagccactcatatacggtccatttgctgataagtccaagtcgccgcaaagtgccgctctacaggatgcgctccaatgcactcaatgccgagatctgcatattattccatatatgatgagtgcggatattgctgcaggctcgtatatcatatcggaatacccacctttcttcgccagcaaaattgcatcggatgattgtatatctcccctggacacaaacatggcagcccaccaaaataacgatgagacattttgggaagacattaccccaacccagcaacagcgctactacgacaagatcgataccattctcaagaaggcagaggccgagtcaggcaagccaatagatgaagccaccgttcttttcgcccactaccaagtggacttccacatccgccaacactaccttgccccccgaagtattctgaatttatgccgctcaaaggatgatattcgagcgctgacccactggcaatggaagagcgctgtatcagataaaacagcctttgcaggatgccccgactggggcgtgggatgggtgcatgagccgagcaattctataggccagcagattgcagcttggcgtatgggggaacgaaggcgagagaaacatctcgcggaagtgcaggcccggtgggctgagatcagagatgagcgacagaaacagaggacgaggacaataaatattttgttccagggcgcgcatgttaggacttacaagtatgagccatgtggaccgtgtctgacggaggaaaagattgtggacattacaagggaaaggggtgagcattatgaagccttttggaagttatatgacgagtgagggactcattgaatgctattatatacgtattgggttgtttgtttaaagaaaatacaaaatcctttgttcctcctcagtggcgtctttccaagggtcttttttagatggatgttgaagccttttctgggtaattttctgacctttcaattcgtacaataacggccagagaggaatctgaagtcgttttggatatttgttaagtatgtttattttgtctctttcaagtcgaactaagcaagtggcgttctaccaagcaaaaaacaaacaaacaaatagaaaatctatctgaaagacaaggaaggcagtttgaagcgcactcgcccacaatccagggaacgggcgtctccatgccaatgttgttgaccgtctctagagcagacatacccaccaactgcctcacttagcctatatctgaggaacattttcactggcgctgtttcctcgtccgtgaaactccaaagctgcgagtattgtaagactatctcctgaccgtcatccgaggcttgaataatcctccctagcttttcgcccatgaaggacgagactagaacctatacaaatgttagttatcatcaaactgcagagtccgtgaacacccacaggatgaaactggcattcgatgaatggtctatgattcactcgacggatgaaggtggaaacgatggctttcaactcgtgtatagtgattccccgatttgtattggtgggacgaacattagagatacatgtcatgaccagatgtggcttgcgagggcgatcaatgtatcgatattgattcatcactcgccaccattttcgaagcgggtcgtttagactgttcacgaaaggaggatcgccatttttttaatgtgggctatgagttgtcagtttcatcttgaagtgtagaagcatatggaattgcttgcagcctacttacctccaatgttcctgctttctgggaggttcaagaatgaagaaacgggatggcccttaccttggtattgtcatatggcagtcaatgatcttctctgtctgcctggcttgggccaacgcatcattcaccatttcatacctattaatgtcataccgatgcagattcgcaaatgttggagcaacttcaggtgagtagtcaatgtcagaatcattcatgatatcttgtacgctaggaataggagacagtctcagaaattcttcctgttcctgcacgtcaggccggggaggatagagttgaaggagtctatcagggtgaggctgaaagaaggacgggctaaattgaaaagttccgcatttatctggatctaagagcacttcaaatgcttggatgccaagcgcataaaggtattcaggagaagggaagtcaggctcaaagtattcaatgcaccgaaataaagacctgagaaatttatgaggctgaggctgtgcttcggccatgttgacgaagtggagtgaggtgtttaaagaagtaatggaccgaaggaatgatgagagaatgggcggcgtaacattttagaaaccctggaacttacggtagaaggtcttccaatgttgaatgttaaggggattgtaccgccgacccccccttggccgttccgatcccctttggccaattcgaccatcagctatttctgccatttcttgaattttctgcaggtttgaattcttgtttatatagtaaaagatgtacctttctactcacgattttatacttctttcttcaatttgaatgcctaaggtctacaagctgtatgttgaaggccttgaaatataagaagtcactcttaacttactgtgatgcgtcacgtcacgtggtacatcccttgtatatcacgtgcaaagagagaagaataactaagatatagagaagaagtaagtaggaagtgttacgagccaattcgattcagaagaaaagagtgcaattcagaccaaattctaagtacgaagaagaaagggagaaagagaaactatctgagtgtatctgagtgcgcgttcttcccttcttatacccttgcgtttgtcttcgcttaatttcgtccgaccacttaggaaggtacaaggacatagtcgttccttcctcgtttggcaagtacgaaaacgtgaccgttcctgcctcgtttggcaagtacgatccttcccagatcgtcacaggaagtagcctaagtatatagtcgaccctttgcaaaccttgcaaactttgagccttctcgcttagcaatctagcaaatatacaaacagcaataagtcagtaaatatgcaaatcgtcggaaaagcggccaggaagacggtggacgtttatagtaggcggtcagtctatgtacgaattatcaggcaggttggattggccaaaggggggtcggaacggccaaggggggggggggtcgatggtacaatcctatgtctattttgtcctgattaatatggtgggccagggcgttcaacatggttgagggagctctgggaaacccggaatcctcaaatagtggccttgtttttcgagcagggagaaaatctcggagccttcatgtcaggtagaatcctagaggagagaagatagaccatgcaccactcacggaatgaaagggagttttcaagatgctgttacattaggatataaggactctcgtcttgtctgctaggattgactgcccatcgtgcatatccctcttcggtatctatatttctgtctctacggtcaggaagtgcgtcaggccgttcctgccccgtttggcaagtacgatccttcccagatcgtcacaagggccaccagaagccgggccatcagccgtctggtctaattaacgattaacacttccattgacatggtcacacaacgataggtgcaatgcagcaataagcagaattatgtaacaggctcataacagacaggcttttacgcagacaggctttcacgcaggcaggcttcgacataaagagctcgggcatagtgggcgtccactctggaggtggaggcataataatgcaatgtactgaagggagagatggaggatgcggcttaccgatcgagcgggtgggcgcagggcctaatatatagtaattagtattagctcctgataggtgaatctgaccaagtcttttgctcaaggaccaactcaccctctttgctagagcctctgcctcctgctggaggtctttggtagtggcgggggcagagcctggttgagactaatgagcatatggtccaattgcccttttcgagctcgtcacggctggcctcttgggcctggcgcttgttctgtaccaacgaagccccaaatcaatatgattcattggatagcagtcaggaataattttactgggcgcacgggaggcccgagctggaatgcccggcgaaggcagacgcccaccaggcatacacccatactggcaagccagtaacaattctccacagtatgatcactgcgacggcagtgtgtacagaacagctagatcatatattaccgcatattccaacgatacatcaatacgtgcattgtatttggagctgggatgaggagaggtaattgttcaacacttactagaggaggaggatggaggggcattcgccatgctagcgaatgagcgtaggaccagatgttgttttcttttttaagaaaacactgggagcgaccgaaaaaaaaaaaaaaaccttgcagaaacagagtagagggaagattacaaggataggttggtttgttgggtgtccctgcttttatatgccaaggacttcactatgagtgggaacgacaggtcaatttctaagatgatgagacctctatgtctacctatataagaagcttgtcgatttcgccaagactcctggcattgatctatgtttatacaggaactcagtggcagtaatttaaagaaaagctacattctagtcagcgtagaatagcatcaagtcatcgcgagtgtcaaccaagcaataacaaaatagatatttcaaggattatttgttataatgactttccatagaaggtatgccgacctctccaagtgagcctacaacatatatgctcacgtgcagtataatcttgccacatggaagacctaatttagactagcaacggctgagacgaaagcagcccgagtccaacccggggttgatctgctatgaggcattattggtctgcagtgcatggtattcgggaagtcaaagaggatttgacaattgaattcgcccaaatgctcctgctttactggcccttacctacttctcccattccccatactttcgccatttctttcaaccaacggcccataacgacgatcaatcttcggtgtggtgacattggtccaaaggatttcaggcctagaacatcaccatgcttaggccctctcaccatgctgcgttccccgcgaaaaataccagacggacccgagatcttctcattcagttacctctttaggaccaatccccaaactcgagcaaccttaccccaccaaatccagagattgatgcgggcgaacaacgaaagtaatgtgttccaaggctcatgaacttttgataccgtgggaaaaggaggggaaaacacgccaggtacagatcttccggttgtggctggcccctcttggctcattacaagggtatcatttgtgatccattcggaacgctcacaaggctccggtcttggggaggtcacaagcaattacaaagcccgtgtactaggtattgtagtactatccaacatataggaacccttggaattctccatatatcctcgatgattggcacaatgtcctcccacaagcccccggtttttttttgagaggcgctgcgccaccaatgaaacccaaaccatgactaatccttgccatttcgtcactctcatccacggggtggactgcgtgaaacctgacctgagagacgcagatcgggatttgtgacgtggggattcaagattctgcacggcgaacaagggggtataaaggggcctttgctagctacaagattgacgggatcttccaggtacattcgggtccgactaaagaggcagtccgtgtccgtggtctcctggtcgtctgatcagatggaaagacacatgtgtttcggttcaaatgtaccctttatgtatatacaatctgtgtatacggagtaccacacatcattattatccccattctcctttgaccgggaagccgtaacatatgacgtaacgccgccgacctattagggtttccccgaatcaccggcccgtgaaggagaaggggattccatacaaatattataccgatggaaattgataatagaaaccaaatccaagtgctttatatgtcccaaggtcactaagatatatgtaatgaacgataatgacgaagaaaaaaacttccccctcaaaacgaggggaacgacatccactgacccaccgctgcggatgagaaagtgggttgagcctttgggaatttataacgtcgtcaggtcctaaacctgttacccaatccctgctcctctttctctcttcctttttgatcttcccctccatcttcaaatcttacctatcttataacccccccaccccctactacctccattttgaataacctgaataattatgtccaccaaggttttgctcgttggagcagcgggtgaaaccggaggctctatcgccaacgggctgttggataccggtaactttgtaagctcagcttccagggctgtcaattgaccccagactaattgttttatttttcgctgaacaggaggtcatcgctcttgttcgccctatctcggcccaaaagccagctatcacgcgcctccaggaccgcggatgccagattagaaaatgcgacttgaaggccccagaggagcagctcatcgaggccttggctggtattgatgtggtgatcagctgcgtcggtcctgccgaacaacaggatcagattcctctcgccaaagcagctaaaaagaccggtgtgaagcgattcgtgccatgtggtttcatcaccgtttgcccaccgggcggtatcatgtggttgcgtgatgaggtatgaggaatgtgccacggtactttgggtcagtggactgaccaggcttttactacgcatagaaagaaatcgtctacaaccagatccgccagttatggcttccctacaccgtcgttgacgtcggctggtggtaccagctcgcctacccccgcctcccctccgggcgcgtcgactacgccatgacatccggcaacgatgagattattggtgatggcaacatgcccacagcactgaccgatttgcgagacatcggtcgctacatggcgatgatcatttccgacccccgcactttgaacaagaagatcctcgcctacaacttggtatcctcgcaaaataagatctacgagctcatggaggaactgagcgaggagaagatcgaccgaaactacgtaagtcgcacagacgctcggctccgaatcaagtcaatgtggctaaccgattttttctttttccggagcacaggttcccgaagaaaccatctgcagcagagtcgtggcagcccgacaagccagtgaaacctatcccttcgacccaatcaagttcattccgcgatacctggctgaatatcaactgtcgtggggaatccgcggcgacaacaaccccgagtacgccaagtatctcggctaccacaccacacaggacctgtaccccgatttccaaccgacagatttccgcgagtatcttgagtccgtcattcgtggctcggctaagggagtctacaccgatcgtgtgatctcacggaagcaccaacgacacttcccgcgtaccgagtccagcgattccctctacacgcgcatattccctcgcacggagtcgagcgactcgctcatgtcgcgatgaatttatgaataggaaccatttttacgtatcttgcgttacctctccacctcacccagggactgttccagacaaacgccggcccggaaccgctgccattggggaatatttgacaagacttttatgacctctctcttctccccctctgaccccattcgacggggtcatggaattcagtatgcaaccgactggtgctttttttttctggggtgtcgacacccttttgggcgtttgtgatgttatggccttttgatagacgctggctactttcggtgcctcctcgatggcttggtggcagtcctcaagagctggcatatggaatgcttctattttttgtttatgccattcaatttcgattgtcccatgaagggatttctgcatatagaaaatatatcccaatcctgatcccaatcaattgtgcctcgttctttcccatacttgcacttgcatcatcactatcctcctggctccccggggtcttcttatctgggctgtccactcgatctctgatctttgattcacgtttctggtacctaactcatttgctttacctaatcttaacagtcagggattcatacctcttttttaaaaaatatactacctataggagatgtttccgcgacgccgaccgggatctcgatcctctgcctgcgaactcggacccatcagcgtcgagccaacgataccacaaacaatcccagaaactcatcagattgaacatgccctaggcttcaccgatatatacgggtcattgacaccccgtcaaatcagcatcatcagtctgtaccctccatctcgtacggggacttgcattttaacacaggtttgcagctattggatctgcaattggaacgggcttgatggtaggtactggaagagcattgtctatgtaagattggttcattataccgagcggattccttctgtgctgaaatttgctgactccgacacaggagcggcgtacgttattcccaaaaagcttatgagcgaagatattgattcctcgtagccggcagctattataatctcctacaccatcgtcggactcgccgtttacctcgtcctttctgccttgggtgaggtgggctcttggttaccaaaaccgtataccgttgcagaccaagccgttcgattctgtcatcctgcacttggattcagcttgggctggatgtaagtcccccttcgcgatgagaattgcgtctaattgatttattactgaccgcgcccctagattttggctgaaatatgctgttgtcacaccgaatcagctcacagctgcagcgctggtagtctcttattgggtgagtgcggagcgagtcaaccccggtatctggattacggttttcctttctgtcattgtgattctcaacttcatcaatcatcgcctcccgagcagaattgagttctatgtctcttccttcaagcttgtcgtcatgctaggactcatgatactttccactgtcattgctctgggaggggggccagatcaagaccgaaaagggtttcgatattggtcgtaccatggtgctttcggccctcaccaccatcatcacgcgttgctagagaagttctacataacctgctcgacgatgtcatctgctacgtttgcgtacatcggaagcgagcgggctggcatgactcacttcccgaacgttcgtaaagctacctcgagggccatccagaatactttctatcgaatcatggttttccatcttctagcaatcacccttctcggcatgattgtcccccaggactcggtgtctgtggcatttcctagcgacgccaatcacgaggctgccgcatcggcattcgttgctgctctgtatctggcaggcatctccgtgctaccggacatgttgaatgcattcatactgttattcgtcctgtcaatcgcagactacgatctctatctggcgaccaaggcaatgtgcgacctcgcagtgaagcgccgggctcctgctttcctatcacgcactacccgaagaggcgtcccgatctacgctttggcggtatgctcgtcaactgcaacattggcgtatcttaacgtccgccaagactcaactgttgtctttggatacttcgtggacatggtcaccatgctcgggcttctgacatggatttccattctcatcacccacatatcttttgtgcgagcgcgaaaggctcaaggtattcccgacaaagctctagcctttagagctcgcttcggtctgcctggaacgtgtttggctctcattctctgcttgttcatctctgtcgccattgtctttgactccttcagcttcgattcgggcgttcggacattcgacgtcaaatcttttattgcctcgtacatcagtattcctgtctacatcatcttgatggttggctacaagctcgctgttcatagtaaacacgttgaccccaaggaggctgacctatggacagataagattgagccggagattgagagaggggggggccctagctgaagggaactgcttgtcatggaagccgttattctataggtcattctggttcgtccttggggatcgaaattattggtcatttttgtttatccacggggaaaagcaattaccattcgctatattctcctgaatatgtactccacacctacatctaggtgctgactcctgcttcaacttctaacaattctcaaaataacgactcatccactatgtagtatggcgaacagcgtctcacaattattagcccgtgtgactgatctagaaagctgcaagacatcagccactatgcagctatcctcccgaatcctcgacatgtaagatgtacaattgtcacagtgacaggccaggtggagacgctaataacatctacccggagttggcgcggataaacagttcttctgcacagcgaccagccgtggcctactccatggagtaggttgaacttcaattgacgagtcaagacattctactgatataagacgctcgtctcctcaagtcctcaatcctcaattctgattcttgggagactctgtataaggaaacccgatgcatctgcggtttgtttaccccaccatgcaatgcgctcgcatgagactgacaagaacccccagacgctgttgaatcttgtcatttcatcttttatctaacactccaacacaacaccgccaatttcgtttcctttgaatgggagctcctgtgctctacattccgatgaacatggaccaccatcccactaccccacaacaccagaaagaggatttccgcacttttatcaccagactcaacatcaaatttagcctcgagattcccctccctggaattgagtctccttcggcgcgggagagaaacaccagcctccctagtcagatctacaagcacatccgcccgctgttcttcaataacaaggttgacaagaaaagcctaattgacaatctcgaggaatgggtccgcgggaacctgccggccgcccagaaccagaaccagaaccggaatcatgtttatcaaacccatgcaggtcgccgagccagccaacgacaccacagcgaggaaccggcgcctccgatctcgctcaccggccctgagaaggataggtgcatgaggcagctactagtgctcatggaagatgaggaatatctgttagcgaatggccgtgtcgtaaacacgaaaaaaaggttagccgctaattcttttggaggtgccaaggagttatcattaaaaaaaaaaaggtttgatgatgatgaagacgtggagttccataccgcgccgagttcccctgtgaaggggtctgtgctggctcagtcgccgctggggaagaatgcggatgggagtttgcaattccctgagatggtgcaggctgcctttcgagggccgaaggagaattatggagctacggtcaataatcgtcgtgtaattcaatctcctgcgtggggatcgggaggaatcgcatcgccgacgaaaattcaagttcacccgtcgcctacaaagaaggatggaccgattcagtcgccgggacataataaagagaattttcattctccggcgaagtattcggggacttttcctccgccagcaaaggcgcaaccggtacatacacaccaaccgctccctaagagagcggccactaaacaaccatccaagccccaaggcaatattccccctcctagggaattgacgagcactttgtcgccagcgaagactgcagggggtgcgcaaccatccgcgaagaacccaggatctgtcttgtcgccatccaaaacctctaaaacccccaaatcggtcaaatcaccctcccaatcgccattgaagcagatggatcttcgatcgtttgggtttggcaacagccccagtaaagaaacttctcctccccgggaagatatcgaattcaaaagaccttctttatttgaaaagcttagcgcggtatccgatgaatcgaagcgcaacaatatgacggagtcacctgctcccagctttgcagcgactacttcgtcggtctttatgtctcgcgatagtagcatgatgcaatcattcgatactgtcgcaacagaaatgaccgagccaatggatacccaatcaacctatgcagactcgattgtcgggtatatggctagcgaagagatgcaaagaagcgtggatgctgctgctatctccatgatggtagctgccgatcccgccgagacggagtatgccctgaaacaagagtttattggtgagctgttgtcctacggcccgttttcgggagaagaatccttctcggcgaaaatcccattgcgattccgatatgagctggaacgtatcggacgtgcgtggggaattcccttcaaacagatactcgttggcgaccgtgttaccttcaacactcaagatgatttctggtcatgggtcgccgggcttggtcgacgttatggtcatccgctgccagagaaatcgccccgtcgggcctgggatgctgctgttggtgatttcaaatcagataagcactcggaggtggtcatactctcaggagatttggactggtgtgacgacaccgagtcgggtattttcaaattgagacttaacccgctcaagccagagcggacgtgtcggttccaccgaagatttggttcggatagattcctgactcttaccattccagccgctgatcggcctcccagccatcagaaacagcctgcttacccatctgtccttcgcgagagtattgctacctggctcacgcggaatgatcatcattgcctcggaaggacgtggcgggctttctatgtcgaggaaataaagaccaagcgaaaagtcaaggctgagcctcggttccgggtcgagttcttcgctattgatggcgaagacttcgttcatgggctccgtttaccaatggtggcccctccccgacagcaaagtgataactatactccgatgagtgtagacgctttgctggaatggcatatgcccaagactgcgaatgcgaatcaaagcaactgcaagctcttccagcgtatctctcttggtttgtcgaagacatttgcgacggtcaagttaaagccgacgcaagtgcttcgtttgagagacgatccaacccgggctgttatgaatgatggatgtgctttgatgtcgaggactcttgcgaaccaaatctgtgaccaactgggcataaccaccgccacacctagttgtttccagggcagaatagcaggcgccaagggcctttggatggttgattcccacagatctagtatctctactgtgaacgatgatgatatctggattcagatctcggactcgcagttgaaaatacacccccatccggaggaatggattgaagtggacgatgacccccatccgcaggaatggattaaagtggacgatgagaagttgaccttcgaagtagtcaactgggctaagccgttgcaccctgttgaccttaatatccagcttcttgcaattctagaatatggagggaacgtgaaggagtatattaccaaactcacccgtgatggtgtgcagagtctttacgacgacttccttgaggttcttcgatcaaatagccccgtgctttgtcgagccctgcttcagaagctcaaaccctccggcgaggacggaactggcaaatcccgacgattagagcagtgggtttccagtgatgctgagtccattattcgtttctccgaggctggctttgctccgcgcgatttctttccccttcggatgaagatccgtaaattcttgacatggcttcttgagcgacatgtcgaagaactcaaaatccaggtccctctttcaacgtatgcttactgcattgcggacccatatggagttcttgggccggacgaagtccactttggcttctccaataactggcgggatccacagggccagtttgaagacaacctcctggatgggatagatgttctcgtcggccgacttccagcccatttgccgtctgatattcagcggcgtagagccgtgtgtaagactgagctacgtcattttaaagacgtgattgtctttcccactacaggggatttccctctagccggtatgctatccggaggagattacgatggtgatagaccgtggatctgctgggatcaaatgattgtagagagattccgtaattccccgatgcccgagcatgaatatactgcagagcattacgggctcacgaaacactccgtcccgatggcttcgctgaactcgacggaggactttttggaaagtacgttctctttcaacctcaacctttcaaacttaggtcaatgtactgtcgagcatgagaaactggcatacgatgagtcagtcgacttttcgggggcgaaagagctggcctgtctcttgggtcatcttgtcgatggccggaaaggtggagttcatctctcagagcaagcctggaaagaataccgcaagaccattagccctaaccaacgagcgcttcccgcgtatcggaacccagagcgcaagtccaaaccgtcgaacattgttgacttcctcaagttcaacgtcgcaaagtcggagctgcacagaattctctctggtctcaacgaggcgttccccgagaacgatatccaaaaccagctcgatgaggacctcgttcgtccgtggattgaagcagatgaagcatcgaagaccaagtctgagcacaatcaagaattaaaaaacgccctcgctgatgttcgaggggcgatcaacgaactataccagcagtggaaccaaggacactctgcttctactgacgaattctctcccatatcacgtcaagctgccgagaatgcgagtgcactccctcctcctaagacgggcagacatccgctcatccacacctggcaaaacagccccaatgagtggcgacggttggtagcttcatgtgcctaccgtcgatgcccaaactcccggtttatcttccacgcttttggcgagacattgtgcgagattaaggcatccgtctcgccatcccgccttgtcactaatgatgtgatcgcctgctaccgagtgaatcagaaaatggtggcacatatcacggccaatgcattgcctgggaatgacgccgatgatgtagatgagtatgaagacgaagatgccattgaagccatgctatccttttaaaggggtcattacgatgatggattggaggacaaactgtccatcgaataagatacgagtgacgccagcgaccctgtatttgatctgcccattttgattctgagcgatattttttcctgttactgttgaacatcgcatgagataccttgttgttttgcacgtgttggagtcgatatatagcgttgtcccccgtcagatgttgtcaagacttagaatactttgaacaaatcataccatcagacttttgcctaaagactccaaaacactatcaagtactccatagagaaagttcatcctagtctccaaatgtcaatggcccccacatcacatgccaagctcgatatgccgaaccaggcccaacaaatataagattgggcttataaatccattgaaagaaggatcatattggtgctgtgcccaataataaaacacccaaagcaggctcgtaagtacatctcgtaccggtaggccaaagatcaataaatttccttccatgtactccgtagacatgtgataggacggagcaaagtcttccgggacattgtccatctacattgtacattgtatgcgtacaacgtacggaggagagggaaaaaagaggtgaaaccgaagtggtgaaccgaacacgatgcataactagaatttcaacgtctagttcatggagggaaggtgtcagggatcaagagcaacccgagttgttctcgtattcggattgtcgagtagattctagcacatgtagggatacgagacatacattggcaatgataaaaatggaaacatataaaccttggaggggtttaggtgccttgtttcggggaccacggcgtcttctccgtaggacatttgtatttcttatcgtgtataataaatagtatgcgttgcgatgggtgtacatcgtacttcgtcggaatagaaatcctctattgaaacgccctacaggcaggtgcagagtgcgcccatcgtacgcagggcaaattgttgggcacttcagacttttcatatcgaatcaagtaaataattttcggtaagattgaagttccaagaggggcgaaaggaggcgagtgtgttggggcaaggaacacctggagatttggcatgtgatgaggaaaggtacatgggcggccataacggaatgtactgccgagcaggtaccgtgggaatgtgattacctcaccttcaatgttccttcctaattgggcctagtggacaagtgacgctttttcacgtgaaagacgatacgatgcgaaactccgacgtctttgaggttcattgcactctctctctatggacgatctgtgacccgccatggaacccccccaatccgctaggccaaaaccacctgcccgaaagaataacgccacagctctgacatcgtccaattcacacccctccgcgcatacaagtaacctcacttcatcacttacggctccaccctattataatggtcttccatctatgatggatatcgataacccagaagaccggtctcgtcgagctgccagtgtattatcgatggatgatctcgaggccgcgcaggcccttgaggggcttcgctccggtacgttggctctgatatccccgaaccggcccactaaaagtgtcgcaactgcggttttcactggattcggatggctgtgcaaccgacattcaactaatctcaacaatagattttggacaaacgcctggaacaacgcggcaatccctccccatcacttcaccggacccaccaccgccagagccactattgtctctgctgacttcctcccatccacttatctcctctgctatcaacggctcagtttctgcctacgccacgtcgaaatcatattcaccgcgattcaagtccggtgctgagttcatcgagcgcaacatcggatcacctgtcgcgaacaccgtcggtacggtaggccgcaaaactggtgtcgagagcggtctccgttgggcgttacagcgacgagattctacaggcgaaaattcacacactaaaaagcgacgaaagatggatgagggtgtgtcgccgagaacgatgaatgcggagaagggacacccaccgcgtacacggagctcgtccgatctctccatggccgagtcgctccccccgtacgacgaaatgaggtctcctcactacgaagagaaaccaagaagacgtactgaaccgacatggcaaagccgactagttatttcgacctctggactcggagtcgccatgagcgaggaatcgctacgtagtctgcaatattgtctgacttggcttcgatgggcaaatggccgactaggcaagtccattgtggcactacatggtgctgtcaacgagtgggaaaaccaaaaagcacgatcacagtcggatatcgaggcagggggcaatggccaagaaagtgcctcgttacttatccagcgcattcaggccgtcaaggccgatgtgttatctaccttgaaacaggtagtggatgtggtttccaagtatgcaggaggtgctctgccagagaatgcccgccatctagtgcgtcgacacctgacgtctctaccgcaccgcttccaggttgcatccacatcgcagccaccaccagactctccagccgcctcctctgatgccacaatcagtgcccatcgcatcctggtgctggcccaagagggtctagacatgatggcgcaagtcagcggcgtcgtcaatgacacattggtcagtgctgagcactggtgcgagcggcttggccggaaacgacccgagaacggagcttcatccatgacagagaagcagggcgagtctgcttccgacgctcagccgtatgacatggatgtcaaggagtctctgccagagaatgcgattcaggacgacgtcccgatgtctggaatggcaaaggtatgacgttgtccaagagcttcctctcgtctctttacatattcataatttctgtcacttcttgcctcttatctcggcggttctcttgtttctctcttatctggggtcttcttttcttttttttttttttcttctcatgattgatatcctttctgctatcttcattccatctggagtgataggaaaccccttggaaactttggtgtttgtttgtttaagcgtgcaatcattgtctatcctactattatagttatggatgttggttttcggtatagatatgcgcaagaggctgcgcgctcaggctgaatgaatgcaggctattcatcaatttacacttgagattttcaggagatcgtgtaagcgatctaaatcgccggggcctgctgaacacatgttttctggctaaatcggcccggacctgtcaacatactcaaagggccgtcaatcacatgggccgctatgtttgccttttcgttctagatcgatatcatttcaagcttatccacactgggctcttcgagcgggccaccccatcctatggcttcaagaccacaaataccctctgaggaaacaccaaaacacctgctaatagtcaggcaacgtttcactgttgacataaaatgtgtcataggtgctgctgaagccattgaactgggtagcagtggtacttgtatatgctggaactcagtcagttctgaaaatccagaccaatataatatggcaatactcacctcccatgtttttatatttgagccaatctccaaccttgacttcagaatcaagcgtcacctcgcgcacaacacaatcggtgctgtcacatgtcggtccccagatcgagtaccgatgggggatgcacaaagcatcccctgatttgggtttatgcaagaaccccctggctttcttactgaccaaataaggaaccatgatctctttctccataatcacattcatgaaatttccatatatgccatcattttgataaagcatgtctggaacaccagatcgagcagcactcccaagctgacggcgacgtgaaatcactcgacatacaagagtatacacactacgagcgaaaaaccgacctggctctgcgatcgttgtgataccagctggaaactccgaccgaattgcgtctcgaataataggcgccatagactcgaagcaatcgtcttgaaagccaccgccgatatcgagaattttggggtggaaacctagacgttccgcttgtgagaatgccagacgtgcatctttgatgcccttgcaaaatgacgctgggttgatagcacccgtccctaatagttcaggatggtcaatacatctgaccagctaagaagtccgaagtaccccggtgcttaccaacgtgaaagctcacaccaatcacattcaatccaagctcccaagctcttgaaaggagttcctcggtcgtatccaactgcgcaccaaacttttcgcccagacatatgaacgcaccctcgtcattcgcgtagatccgaagcaacagctgagcttccggcatgtgtgccttgatagtatccaattcgtcgatattgtcaaatgttgtccgcaagacaccaatatcgcgtgcgaaagctacggcggcgggtgctttgcagggattggcgaacagaatccgggctggatctacaccgaggctgagaactgcgcgcatctcttcaatggaggcgcagtcgaaccccgtccccagttctgcgaggactttgaggaaggttgggtcgcaattgcatttgaccgctgtgggaagatgttacttttctattccaaaaataggaacggactagaagaggggtgttgtaccgtaatacggtcggattccgggcatgttctgggtccaacgacgatgctgtcgaagtacctggcccaaatcggcgatgaagaatgattcgtcactgccaacgagagagcgtttgactatacgcgcaatgtgactctcaattgcgaggtcgactagctcgtctggtgggagatttcgatatccggttgcatgtataaccttgctagtgagcgcagtttcactaagagcagggagaagggccatgactgtggagaggagtcgatcgagaagaactggggaaaacggagagttctgtaactgaaacagcattacaagacatgtgtcggactaaaatacaaagtcctggagtatatgaatgttttcgagtgctgcactgcgctcttcggtgaacactgcgaatcaatcgtttagagaagctcggatgaagtgaaaggtgaagaaacgccgttaaaaggcaattttgcacgcaattgaaactctgcattacgttggatctcacgggaaggaataagcaataagtcgcacggataaaggccttgctttccagttaacctgtgagggaaccaattatatttcctgaagttgacgtcttgttttctatgtagggcttttcgtattctgggtgaagatcagcaactagtgctagatcgatcgagctgatcctgcacgattcaatgttggggatgaagtactccatatatcggacgtgatcagctcaatagcagctattatgtggattatggtggagacctacagggtcgagtgaaggcgtggagctgaatgcatgcacggagtagagtaacatcgccacacaagtacataaaggtcaaatctacactgaatatattggatagtgtgaccagaacgatggtaatagtatatttagaatacgaagctgaattgcgaaggtgactgatattccccgggaatgtggaatcgaactaatgtctgtgtctctgtggaatgaacagtatacttgatagcaacgcattcaatactttttatgtcatagaaactgttgagtttcgacatgcaggaaccactccatttccagatgtgatgcgtcgatctattggggagcagctgaaagccctagaaaaagaaatgcccagcattctttcagtcgaagatgagttattttcgagacctccaccccagattattccgctagggcctcgatcttggtgctttagctatgctcatcggctttctcgggctattatacggttacacatcggatgcaccaagcaacacatgtcgaacttgggaggcctcgagctctgggattgactcgtatatttgcttctttcaaaatgagatctacctagctatgacctctagggtgtcagctgtctatagatgggtgttccttataacatataatattgaaatccccgctggagcttcctcaagccccgaacactttggtttcacagactagttggagtcagaatgaccgggaaatggaatatccgcttcaaatatatcttccatatatgctgtgcgatgtctgagtaagactttgtccgttcccagacctaaaatgtgtatgcacgttgacaaagccttgaagaccaatcttatttttaaattcactagaaagccaacctccttcacaatgccacgtccttctactcattggtcctcacttcattacaggaacctgctgagtgacgcagtgaagcaccccaccagtaagggggatggcgttggcatacacctgccgaatcacccgctcagggagcaagcgctgaaacatttccagcgccttttgatccctttcttcgtcaccgaatctggggataatcaggcctccattaacaaaatagaaattcacataactcgccgctagttcgtcgtgatcggatttcaccaagcctcgtgggtccggctcttcaatggtgtggatctgcaagcgccgacccttagcgtctgtctcgcggtccagaatctctcggatctccgtagacagctcctgccacaggtcaatcgcaataggatgtggttttgagtaagcgatgacaccagggcgcacgaatcttgcctcagcatccatatgcacgtcggtaatgtcaacattgcgccgtcctgggaaccagatcaccttttcaatcccgagcagccgcctcaactccgtctcgatctcggccttggacatccccgggttgcgcacatcacatacaatgctactctccgtgataagcagcgttccttcgccgtcggtaacgagcccgccgccctcggcgcgaatcggagtctcgatctgcgtaacggggccgggcttgcgatcgtgctccattacccaccgcgcaaaattggtgttttcctgtagtgccttcttgtccatcacaggccatcgctgaccccagcagattccgtcgtcttcgggtttcttcccgccccattcattgaagcggaagttgattgcgaagcgtcgattcgggaatgcgcctatcttgtcgcgcacgtagactgggcctgtgtcgcggacccagcagtggttgattggacaggggatgatagatatttttgttgcgtctttcacgaaagtctggactagggactcggccaatgggatgtcttcgggcctcacgtatagccgaaccggttcgaagtcagtgatcgccgccgctagttgagctaattcattgcacatggcgtcaaactgatcggggggtagggaacatcgagatggtaatcccatgattgtcgcttcatgaggctccgactctgccgggaagatgtagctgctttgaactttgctctcattactgctgatgtgagagggttggaaccaggtacgtgtagtagtatagagattcgacagaaatttgcggaatcgctcgaatagcttcatgctgatggtcgctcgtgagttctcgcccttctcgtatcaagctggagtttctctccttcttaaagatgcaattcggttgccttcgtcctcattattctcgcacatcatctatttcgtgtaactatgagtgcctcatgttactcacagtttcgaagttgtgttcttggtgcggagtggtatttccattaaaatcaccgagagataacatgatttcggatatatagaaaggattcaggcggaagagatgttaagaggaatatatatagcgagggtttgtatgtcaatacgaaatacccaaacgaccgaatagctagacttcacgttcagtggtgcgagagagaaattataatctcatctcacttctcatggtctcaaaacaaatgcaataaaaagccacgtttgtgctactatatacagcatggtgcatgctactccgtcagcaggggttcacgttccatctcctcatcggcagactcagtccaggagacttcttccataggaccactgagccacaacataggcatagccgtaaccgcagaaagaactcccagtgcaagagtcataactttccaaccgtatcggaactccacgaatccacctaccataggtcctaatgccaaaccgccaaaatgtgccatattctctaagctaaaagcttgagccacggcacctctgcccccaaagacccccgggtctccagcttccatgtcatccaggacacgctgcatctccactatcaaggccggctcgcttaaatcgatgcacattccaacaagacacagaatcacacaaagaagacctatgtgggatggtgagttttcctcaacgaaacgaagacagatcagactcggggctagaatggcaaagcttgcgaatgtgatcactctcgcaccaagacggtcagatagaaatcctagaaagtaggtcagatcatgcaacatagtatgataatatgaggtcagttaccaaaaaaaggttggaaaatagcggctgcggcacctggcaagaatataagcccagcgcctaaaacattccagttgaatgtgttctccacaaatattgggagtgtctatatagcagtgtcagtacattccaatataaaagactgaattccataccgcatcgaatgccgagaccacaagagcgccgactgtaactgcccagaggcaaacaagaacccggggctgcttcaaaatctttgccagcgcaaaactactcttagaaatttccgtgatcgtatccctagtgcgtatagtctcaaaagttccatatggcggctgctcggggatataaccattctcctgggttggccgctcgccatcagtgagacacagccaacgttgagcaatcctcttctcaacaacagcgagtctaagaaagaagtcaagagcaacgattccgaaagccataccaaaaacggcgtagaatcctccaagttcgtaaactagtccgcccagcagtggaccagacataaagcccagtgtcatggcggtgccaagatacccaatcatctgtccaagactcgctttatctactgcgtctgtcacaattgaaagaccagctaccgagaccatggccgttgctgcgccttgaagcaccctggcgatgatataccatgtcactgagtgcgaagctgtcaagattaccatagatgcgaacaacagcacgagtccggatagataggggccctggcgtgttccagagacgtcaagtatgtatccgaacatcggacagcaggtaaatgccgagacggcttcggcgatgaggaggacactgttccaatattctcctatcaaaagagaggctattagcaaatgattatctgtcctcgtaaatcttcgtactgtcttcgaatgctaccccagctcgtaaaactaatgcctgcggcatgacggggacaatctgtagcggtcaggtaaatatcaaaggtactagtcagagcatgtgtaccatagcgtagagaaagagatccttatgagtttgattagctgaagcttagtttgtctggacaggggatcggggaggataccgtgaacattgacagagaaatcgtcgtcactataaaggattgcgatgaccttagcggcagcagccacggtcgctggtcgcgaagcttcaaaaatggcttcgaccaagtcatgattagtgacctagttcaaacactgtgcgaatggtatgaggatatgagttgaataggtgggcttgttcttctttaatgttctctttctgtatgcagtctagaacttaatctgcattagcgaccgcaattgggtaaagattctcgttgatgtgttcaattgtactccgcagctgcatttacaatctgtttttgcgctagacactgcaagggagatgctcagatcactgctgatctctggggcactgtggcttagatgtgtgaatgacgttgctgcatcacatacaacatataaatttgacagttataatgaatatagatgcctattatcaatctcaaatccaacattttagagggaaactgccggaaccctaggtcggacaggtgtcttcataatatatttctggccacaaaccaactctgtgaaacgcaatgacatatctcgagaggatttgagcaatgcggtttttattattgcgtagtcgagctagtctttgcgcgctgtgctgaagtaacttgcaatcagtagcctgtatatccaaggccgtgaacttgggctgtccaccatttttagccatggtaaatattgcagtttccctcaacaaatcccacttatacgacatagcaggctctttttcttcctctcttagctcttctgcaccatctatcaagttcctggctgtttcgttacattgcttcttagggactgcgcggtaaaacatgaactgaatgtagatgaactgagttactccatgattccatcggcctagccaatctgtcacgatgaagcgcatatctccgtgataaatggagcgcaagaataggagcctcgacgttatttcccgatcctactttgtaggttacggagtaggtctgtttacatcagtttgaaaagacgttggcttcttccaacataccttgagcggttactaactatcaggagattggcactcgttgggtccatgattaactgaagaaagtataaatttaagcgaatagaattctctaaatgtagcgaactggcgggagactgcgtacgccgtcatcttcgtttgacttccccccccccccccccccccccccccccccaaaccttacccgcccgcannnnnnnnnnnnnnnnnnnnnnnnnnnnnnnnnnnnnnnnnnnnnnnnnnnnnnnnnnnnnnnnnnnnnnnnnnnnnnnnnnnnnnnnnnnnnnnnnnnnnnnnnnnnnnnnnnnnngtttccccccccccccccttcacgtagttacaaacgaagtcattgcgagatacgttgaatggtggggctagttattactatattgcattaatgccttatgactcttgtacgtagagtttatttatgcttacaggtgtaagcatgtgttcattctccacacccacagttttaaaatagtacgcggaacaagatagagccgtcagtgctgcgtatacagtataggtggggcctggaaattttatagatggtagttggaacatgctaatgcagcccaatatcgcttagtaggtcatcgttttgttactctagaagtcgatttaagatgagaagaaggtcaatgatgtatgtattaggtgagatattagaacttctctgtgaagcatcacaacagaaacgatctcaaacaaacgaactaacaagtatggaaacaaagtataccacatagctcctgtaacttttccatcgtgcaaatctgactgactccaaagcgaggcgcttagagaatggagccaagggcaacacaaggaagaccggcaccgacaaggtcgttgctggcagtggagggtgagttggcgcagcaggcaatgttctgcttgcactgctggttgaggagatcctggacaccgacaccaatgaggacagggactggagcgggttagtgagggagttgacaaatgtatagaatagtaaatcttaccctggaggtcgagcttggagcactggtcgaagacaccaaggccggaagcaccagagccggaaccgatgaggttggagagggtgccggcgaggatgccagagttgatgtcggtggtgtcaccggcgtaagtggccttgttgcagcaagagagctgagcctggtcaccacacttggactgggcctgctggacagtcaggctgtcgggaacggggaagcgaggagcgccaccgttctggtgctggagaccattgttcatgttctcagcgggcatggcagcggagaagccagcgagggcgaggacaacggcggagagagtgaactgcatcttgaaggtagaggattgaaagattaaaatcttaaagatataaaaaggttttaggaggtttggaagatagaaggttgagagaggtagagaagtagagagctgatggataaaaaaaatttggtacgacctggtgctcgccttttatcttccgttcacagtgcttgggcacgaggtgatctcccagtattcatggtgagggccaaatacaaccctcccatttttgcggatggaatgcagaacgcaagggtttagtcccgggcctgccccgatgatctccacctcctagcaatatcattggctcatcctcgattcccggaatttaacaatcaatgagatgctcccccttggcccctggagatgcatgggtcctgcattccgccctgtcagtggtatctgtcaaggttaccttacgccctgattcagttctaggatgtccaatcctggcttacatattttgtaaccctgcgagcctcacatgaacccctaatcaaacgagagcgagcatacacgtacattaaattagagatccggattcagagtccttctagaagtgatcaaggcgtggacaacccctaccgatgaattccctacagttccaaaagctgcccatgcgcaagtatttgaccatttattgtctttatcgctgattaacataccttggaggcgttcgggggcgttcgggggcgtcctggtggcagaaattgtccgatatggtgcatcttatttccattccaggcatgattatggcagcgtgtctttgcggcactttctaccttgttgtatctttgcaatcatgcgtaaatcacagtagagaccccgttcaattgccgtcccttacccatacttggatccaccgtctacctatctctcagtcccagggaattcgagatcgtcggacccgtgtcgatcatggttacttcggattttctaccctgctcccaggcatagcgtgtgatgttacgatgggcaaccgctgatctacactctcccttgtcgatgcaaaatcaaagcatcacgggaaattacaatgtatggaattgcaatgtatgggccttcagcatgttctctccatcaggcttggtctagatcgaacgttttcgggtctgatgattacaggctataggatgccaggtgatcctaatcaaattgtatttgattgaagaatgaattgtatactctaatagggttagcagtagagagtagctcgaactgtaccttgtcacctcgtccaagaagttgtgtctggtgtctatctacgatgtgtgtagattgtatgagaatgtttgaatgtttgaatgtttgaatgtttgagggtaccaccataaagaagcagactcgtagactcattaaggaaacgagtgaaatgattccggttcttatatgttgtagtgtgctataatgtcgatataaatatatatctccaacgaatgtcgaaaccagagatattatcccgcccagatttaactctttaaataccacatgctaaaccatcgatcaaaatgcattgcttagttctactcatatctttttaattagatcattgacgattgagccttaatgcttcaatggagaagcagttcatccgcatcgggaggttgttcatccgccactaaaccactttcggcttaacgtacgccaccggtctacctgtattccgtactttaacctcactttgctactatgtatgttgagtcggaggcggataaatatcaaagggtcaatatgagtccgtcgagaggacattatataccgatcgctagtataaggatgcttgaatcattagggttctatcatcaacattgcaatccatttcgagctctgcaatacaagcaaatcccaagctccaacccactctaaaattcacaatctgaatcccaaaacctacaaaccatcaaatcctagaaatgacagccattgcctttttcggagcaaccggtggctgcaccaacgcatgcctgacctacacccttctcaacggttacaacgccagagcgctagtccgcacgccctcgaaactcacgacactgctcctctcacagcctgacataacacaagatattctctctcgccagctggagatcatcgaaggcgacgcaacggacgtagaaagcatcaagaaaaccctcatcacaaactccaacgcacccaatggcgcatgtactctcgtaacaagcgtgatctccggcctgggcggcgcaccgacaatttccttcaccaaagaaacaaaatgcgcaaagactcagatccgtactcctgctctgccacacattaagctctcgaacccgcacatcacagaacagtcgacgcgcgcgctgctgacggcgctggcgcagattgcttctgagcgttttgcctcgctcggggcgtatcgtgccgttgcaccgcgggtcactgtgatctccaccacagggagttcaggtagtaataccgatgtgccgttctggtttagacctatgtactctgtgctcttgccgattccgcatgcggataagctgcagatggagaacttgcttgatgaggaggttggactgggctgtgccggggtgcttgctgctggagttgttgttgtgaggcccagtcttttaacgggggatcatcgggttcctactgttcgtgaggggaaggggggtgaaggggtggggctggaaaaagtgagggttgggacggagagggcccctgctattgggtatacgatttcacggggtttggttggggagtggatttttgaggagattgttaggggtggtggagggaaatgggttggggagaaggtcactatcactacttgagcttttcgccttctcttggtttcgtgagattcacatatttttcgttgtttgagaagatagctacgttgagtgcatacctggaagtgccacaaatttttgcatcaagtactcaaaagatcagctgtattcaaagatcaacgttatatacccaaaatcacaagtcactgcattgtatcggctaaaagcaaaacgcccccgtaggccagaaaacaaaatcacagaaagcaaatatcatccctacgggagacaatgaaactccgtataaaaccaacgataaaaaaaaagcatcattaacatctgatgatctgtacaggtggggcaaaccttcctaatgcccatttcatgacgttcgtgagagagaacatagaacttgctgtgatcaggtgcccccatgcggcgctgagcggtcgatatgagcactagagcggccaatctgagcactggaacggccaatctgcgcaccgggccgctcgatttgggtactggtccgctcaatctgaagactgcggcgttcctccttgatcctcttcttttccatcttcctcatggcttcttcggtcagctgttggcggaacagccgttcgacaacatccttctttcgggtgcgccggtcaccgatcatgatcatcacaccacctgagatgttacaagtgatggagaagcaaaggataaccgttgttagagcgaatgggcgcctatgagggtcctccatactccaggtacaggcaccaagagccatttggagtatagagtgacagtcgaggatgacgacaatagcgatgagtaagcgtagagggaaggcgtggtgggtcatagtttcgtgcggcttatagaaagtatgcgactttgcgaacttattctggtgatgcatcaatcgtaactgttgatgagcactgagaacagaaaattcatgttcctcttccttgactgcttcaccaaattcaaggtcggcgtcggtctccggcttcgacggaagatcgttcttatccttgaggcttggaagggcccgcttctgacgaagtttccacgacttgagtgtgtaatgggcaatgaaactcatgtgatatgtatccacggcgcggaaaggagccagtccgtcacccatgatggcgaacagggcaactaaaatgttatcgatgatattgacaacataactttgtctggcaccgagattgatccaacctgaagtgaccgtcagcatagtagatagaaagtattaggtcagaatatctcaccaatcaagaaaagaacccaggccagaccgaacagagtgatcaaagttgcgtagagagtcacaagaaagccgagggctaggcgacattagtattaagcaagaaagtcttggcgatgaacttctctcacgcttctttatgtattgcctaaatcctttcatggcccgtttgaacttggaccgccgagagtgaagcatgtgtcgaacatgatcatttagttcagcataatcttctctgctccatccttcaacctgccctcctggaagaacggcatacttgggaccaggcaacaccgaggacatgctcgtgaaatggacttgttctaaattcggccgctccttaagcttgtcatcggacagttcattatcgtccgttgcagttcccggttcatcatctgaagaagaatattgtggccgtgtaatcgtatatgtgggcatgcggttgacgaaactacccagattcggcacgaagagagagttttggacattggtgagagtggaaagcgcggaaacctcgggatctaggttcggacaagttagaaatatggttcttggattacacttgatatcaatgcttaccgatcacgtccagcacatcgaccacgtgagatccatactcatcctggcgttgctcctcctgttgcgtgctcagagttggtgcagtccctgtcactgtagctgcacggttccgactaaagcgattcatcgcagcttgactacttcgtctaagccggcccggtcgcactggggcgggagggacctcgccttgctccaggtcaggttggtcacagtcggaccgagcccgtccaggcaatattgccgctggagaagggggtgccggactttggtgtgaggcttcctcggtcagaggcaacatccgcataggggtcgccactcgagagaggccatcgggaggggggaatggccattgtcctggatttggctccgagttactgcgtcgtcggtttgccagccatgattcgtcctcttcattggggggaggggacgggatgggcctcggttcaaaggacgatggtggtcgactccctgattgagacgccggttgattggcgttgtcgagtgaagcgagagatgggaagcgagacaagcgaatactcggtcgtcgcattcgtgagtcgccccgagagcgtaacgagccaaggcccggcctgacggggccagactctgtgggttgccctgtgggttggatctcctgaggatttccattagaggtcctggggtcctcgaccgggtcgataggatccatcttgctgcaacaagattcaggaggttggggacaagatcatacaataaaagtagcccccgagaccaaaagaaaaaatgagataaccaaggatctgagactcccgagtccctcgttagtccccggacgttctggatcttcggggcggttcacgtcccaggctgactcagctcttcccgaatcttgtttttttctttctttccagtgacgagccagtggagttcacaagttcaatatcacgctaaattgacgatctttctttttccgttctggagatcttctttcaaggtcgaaggtcagatatcaattgcgtaagtcctgaattggagccacctatgtaaatggactacggtgatgaagtttatgcctgatattcaaggtgtctagactcttcatgcggcgatggcgataaccggggacccggacgtcatcagaagagaaccatgtagatctatatcgtgcgttacgacatattgtacaactttgtatatgtttttgatggcaattaacagggttaaagttcataacaacttgttccgtaggattcattccatgaccattttagggttattcattatttaatggctgcaaagatggctagagagatgtacgcattaaataacgattttaaacgaccataacaatgagccctgctctatctttaaactatttctctctcaaggcacagtactaacagctttcgttgtctacggagacgtgcacggagtgaaacaagcatgcgataaactcaacggcttcaattttcagaacaaatacttggtcagtacggtacgtgcatatggatcaaatgagtatcggtaattatttgaagatgaccaactttggatgttatatatcatcgtgacactggtggttaccgctacattgtagaagaaaagggcccgtgccattctaaaatatacatcctattccttagtgccaaactcaagatgcataccgaggcatagtttacatgcgatcaaaccagaccgaagttgttcatgaggaatgaccttgagttggccaatgtttctaaaactcgggtagatgaggaattaaccgacagagataggcccaagggctagattgtgtttctagatcggagctggcttgagcagagataattacttgtgagacgactatgatattgtgtaagatcaccgtgtcacccgtgtagcctgccctaatacttgtatccatgaccgaataattctggttgcatatcaaagtaaacaattgtatatccatgtcggccatcttctacaatctataatgtaagatgaacccgagccaagccgtggagaacatgaagtggagataaatgttggaagatcttgaattatttataggacctgtcacatctgcatatcatctagattctgcacatgtgcataacgtgcagagccgaaggatgagatgaataaaatggactaatcgagtggaataatatagaaaggacgaaagccaagagccgattatgattggcgggaaaccctagaaagtccccagaatgacatcaggtcagctgttctgagtcaggctttcaggtaaggcggggctggtgtttagggcctaaaggcgggacctcaggagattctggggctcagcgcctaacaataggggctggttggggggaaataggggtatcgtagggcagggggctaggggggtacctacgtgaacagccccccccagtcatcgaggcaagtacctcgattgcacctgtcgttgtcatttcgagctctcactgggctagtgccacaccgcctctcctttcccatttccatctccttctcccatcctcctctttcctctcttcaagatccagttcatccaaacttcaatcccatcttctcttttcaattggtatctagggcacgaagctaccctgctccttccccccgctccacctcccgtcaagtctctttcagctttaggcaaataaacaacccgactcttttcatcctttaatatctcaaccttcaagatgtctgaagtcgatacacttgctgactccgtggctgcgaccactctgaccgataagcccgaaatcaacggtgctaccccttccactcaggcagctgatgccgcggctgccagtgcagatgagggtcgtcgtctttatatcgggaatctcgcatacgcgacaaccgaggacgagcttaaggagttcttcaagacctacactatgtgagtacttcccaaattagtgttttcgtccgaacaatcaatcccacccggagcaaacattcaatcacgtggcaccatcatttatgggaccatttctaactcctttcgtcttaaagtgagaccacctcgatcccggtgaacccccgcaccaaccgtcccgttggctatgcatttgtggatatcgccaccgcccttgaagctgctgctgctatcgaggccctttctggcaaggagattcttcagcgcaaggtgtccgtgcagcttgcccgcaagcccgacatcgccgagcccaaggaaggtgctgccagtggtggtgagggtgccgaggctcgcaagcgtgctgctggtcgcggccgtgcccgtggccgtgcccgcggtcgtggtggccgtaccggccgtagccgtgctgtatgtgccaaatatctttccttgcttgaatctacgcatatcgacactttgaaatggatgctgacactcccgaaggcccaggaaggccaggaagccaccgaggcccctgccagcgagactcctcttgctgacaccaccaacgataaggatactgcctccaaggctggtgacgcccccgctccaccccccnnnnnnnnnnnnnnnnnnnnnnnnnnnnnnnnnnnnnnnnnnnnnnnnnnnnnnnnnnnnnnnnnnnnnnnnnnnnnnnnnnnnnnnnnnnnnnnnnnnnnnnnnnnnnnnnnnnnnnnnnnnnnnnnnnnnnnnnnnnnnnnnnnnnnnnnnnnnnnnnnnnnnnnnnnnnnnnnnnnnnnnnnnnnnnnnnnnnnnnnnnnnnnnngcggccggcggtcctcccgaggatggcattccttctaagactaaggtcatggttgccaacctgccgtacgacttgaccgaggacaaggtgggttatatctattcctttcgtctgatctccgtctggggttacattgactgacatccttttctccatttagctcaaggagatcttcgccgcctacgagcccgtctctgccaaggtcgccctgcgtcctatcccccgtttcatgatcaagaagttgcaggctcgcaacgagcgccgcaagactcgtggcttcggtttcgtcaaccttgcctccgaggagctccaggccaaggccgtcagcgagatgaacggcaaggacattgatggtcgtgtcatcgccgtgaaggtcgccatcgacagcccgggtaaggaagatgatgatattaacgctgtggctgagactgaggagactgctgctcctgcttctgatgctgcctctgctcctgctgctgctgctgctcctgctcctgctgctgatgctgatgcagctggtgcggctgatgctcccgctcctgctgctgccaaggagaacactgctccttccgtcaccactgaggcttaagtgccgcataaattgtactcgactgaacgaggtacttgttaattggctttaaggttgagaaacagaaggggactcaacggaggatcgtatcgatatgaccatagtgctctgcaaaccacagatcattgtgaatatcttagctactcaacgattgcgggagaaatggggagaaccctggtggggttggattcatgactttatcggacaacatggatcagccgaccatgcgagggagccatcttagctgatgtgctcttcgtccttaacgactttcttttttttttttcttcgccttctgtattgtacctttagcacacatttactaaatgatgacgatctccacctggcgtattcgatttaagagtaattcctgtacacctatactatagacatgcggtctacggagtatacaagtggttgtgcccgatttggagatgacgcgaagtccgatccttgccgatcagaggcaaaacatagaatttgtattctttcaattctttccagttgattttcattctctcgagccagttccattagctttgtgtcttcagtgtctttcagtctccgcacaactccatcgaaacgagaaaaaggggtaaattattcaacatcggtgccgcctcggtcaaccctacaacatcctagcgcacaccattatttagattgcgtccctcaacgtctcaccgtcggcattgtatattcacccactatgtcgcgcatgtgggaagtcgacccggaaacgaggacaaaggtgtgccaggtcaattccacaacgcgccatggtcactgacacaaccatgtgccacagctcctccaaatctccaagacgaacggaaatgacaagtgctgcgattgcggtgccccatcgcctcaatgggtattctttatcccttcctcttgcctattgccctgatattgtcttcgagaagctttatcatccccaacaacccatacacacctcacaaaccacacaccctgctaactctttgcttgtcattggcacatcaactaggcctccccgaagttcggaacattcatctgccttaactgcgccggcacacatcgcgggctaggcgtacacatctcatttgtccgttcgatcacaatggacgccttcaaacactccgagatccaacgcatggagctaggaggcaacgagccctggaagtccttctacgatgaacacccagtcaccgtctccgaaggccgcacattcgaagactccacgattaaggaacgatacgatagcgacgagggcgaggaatggaaggagcgcttatcgtgcaaagccgacggccgcgagtacgtccagggccaggagaagaagaataatgccccctcgcgctcgaacacaacttcgaaattgaccggcacgactgtcgctggtgccggtgctgtcgctggcggccgggctggatcgcctgcggcctcatccatccgctccggtgacagcttgcggggtgtgccaggcaagaaggagcagaacgaggcttactttgcgaagctggggaatgaaaatgctactcgcgtcgatagtctgccgccctcgcagggtgggaagtttactggtttcgggggtggtatgcctgcgcccgccgcgagtgatcggcgcacctcgccctttggcggatttggaggttggggtgttgggggtggaggtggaggtggaggtggtcagccgttcgaagatcttcaaaaagacccgttgggcacgatcactaaaggacttggatggttcacgtctacggttggcaagagcgcaaaacaggttaatgatgcttatctacagcccacggctaaacaggtgtgttgcacgacctcgcttgagagcagttataggtgtctatagcttcttccgatgcaattactgacatgaattacccagctggccgaatccgagttcgcggcccaggcccgcctccatgctgcaacactcggccagggcctgcagacaggcgtccgcggcgctgccgaccagttcaataagtttgtcgaaggagaggatggacgcggtgacggacgccggaatcgcgtggagcctgagcgccgagacttctgggacgacttcgcctcaatgggcgaccaagagacacctagccatcgccgtagcgcatcacaacggtctcaacggtctcagcggtccgacgttgttggtaccgctgccatgcgcaagagccccactgcctcctcgttgggtcactctacgcctggtttgtctggtgaagccggagagggtaagaatactacggcttcggcgacgggtaaaggaaaggatgaatgggatgacaactggtagcatataagcgctctattttactgttctctgtttgtttgtgggccgttgttatggtgccatgactttatgtctctatctgcactacacatatatcttggtagaatctccctctttcgcaaagggaagatcagatgcatagtccataatacttcatattagcttgacatggtgtcaatcggggaggtgtgagaaaaagggtggcagaaagtagaataatattggtacagtgatgagatactatgagattgtgataatatacaagaaagtttctactgaatcagcctctcagttccgcaagcacggccttctgtctctgaccagacatcttctcaaaccggtcaacactcatgacaaaagtaccgcggccagcagtcaagctccgcaaatgcttgagatacccaaccatctccttgagcggcacctttgcgacaattgtgcgcgggcgagtcgcagcagcagggatctccacgccaatagaagccgtctcgaacggatcaggcggcgcgtaaacacggctgtggtcaatgggcggcaatgcctcttcttccagtgcagatgcagaagtcgcgtccgtgcctgatagcggtacctcctcgtcaagtgagatgatatgtccacctcgtgaggaggaaatgtcgtgcacgacggagccgagactcgcctcgtcaatgctgataatcacatccatcaccggctccatcattactgtccccgcgccgagctgtacatccttcaacgccgcagcggtggcttggcgtgcggcggatgagagggccgaggtggttgtttcgttgccgaagaggtcggcggccgggttgatagttagtgtgacgcgggtgttatgcattgggaaggtgaattgaggcccccgggcgagcgccgccacggctccgttttgcagcgctgtgcggaacgcgacgaggtccatgcctggtgggagcaatgggctagtttcttcttcgccacgcgatgactggtcaatttggagaccgggggcgcggatgatgatctggttgccgtcgtaggtttcggcgaggagcgtggcttggtctagctcttgggactcgaggtcttcgtccagtggctccacgactgctgtgcagcctgctttacccttccgtccggcgatctccttgtcgaagatcttggttattgggctggaggtaccaagtacggattcgcgatagccgatctcgatgcggcccattgtggccttggctttgagatcgttgattagccggtcacgggcaatttcgagatgcaactcccccatgccgcttagaagcgtctggcctgactcttcgtctatgttgacgtggagactggggtcttcacggaggaggagtgcgagcgattctttcatgcgcttctcctcgcttaggctgtgcggctcaacgctggtaaagaataccggtggtggaacagcaataggtcggagttggagactggtaagcggctccgggggagtagctttgttccctgcgtaggacacgagggtatcgcctgtccgggtgtgtttgagcccgactacgactccgatgtgtccggcagcgatcgagtccacttccacggcatcgttggcgtacatcttcagcagacgtggggcacgctcggagagctgcaggtttgtgttgaatagaaggctgttgcgatccaacgagccagaatatactcgtacgtagactagaactccgcgctttgcgtcgttgaccactttgaatgccagtgcacagctttgaagcttgctaatcgcatcttttgagctggtctgcaaggccaagttctttttcttcggttgtttccctttcggttgcgcggatgccttctcgctctgctccacaattaagtctccggacagcaggtcccgaagacctcccttgacaccgccaatactcacttctgggtcgggagcttcgggcggacttgggagaagattcacgatggaatctagtaatggctgaactcccatgttccggaaactggcacctgcgaatagagggacaatttgactccgctggtccaacacgcaccggcgcaagctctcaatgatatcagctggcgagacggcgagatgatcttcttcacactcaaagaatttctcaacaatgtcttcatcatgctcactgagcagctcgaccaatgcaattcgtgcgcgccgcagctctgcggccagagccggctcttctgcctctaattgctgaaggtcggccacttttacattgcggccatcctcgccttccttccatcgtagtccttggagatggattgcatctgctacccctataaaggggccattgcctccttggaaccacggtatctggcagaccgctggatagacacccaagcgagtgctgacttctcgcaccgtcctaccaaatgcggccccgtcgcgatctagcttattcacaaaaatgagtcgaggaatgcgataggtgcttgcctgattccagaccttctccgtctgcgcttcgacaccggcaacaccatccaatatgcagacggcgccgtcgaggatgcgcagagatcgcatgacttcaaatgtaaagtctgcgtggccaggggtatcaatcaaattgatagtatgcgggtaagtagaccgcggggtttgctcattctgcgccccagcttgggggcctgacgctccatttacctctccgggaggccaatggaaggtaatagcggccgactggatagtgataccgcgtgcacgctcggcgggaaggaaatcagtcactgttgagccttcatccacatcgccaatgcgccgtgtaaagccactgtagaataacatgcgttcggtagtggtagtcttgcctgcatcgatatgggcgataatgccgatgttccgggtccggtccagagtctcatcctggcatgcagatgtcgtggaaaagcgttgaagctgtgtgtaatttgaccgaagacccttgagggaggaatatgcatttttccacgtcccattgctcggtgtcttatatagattggagctcatacagcgcaccccggagggaaagcgcaacaacggagcgacgaccattccaaggggaaacgctcatgtaataagggacagaagatgaaaaattaggttggaattggcattgggctgtatgatattgttattgatacaatagaagatcaagctctagagcgaagaaatcggaccacaaagcggactggggatcgccaggcttggcgcacgcattcctcaatgcgtgacttgactccgacactacctacctctcctcaactactcagatccttttgctcatacccttgctgtttatttgctgtctttgttatgccaattcaacgggtctcatctattctctccgtttgaagctgcacgaggtaggtctttgagtgcctggaagctgaccattactgtgggggtccgatcttcagccgtttaatactgacgcctgccatgaccagccactcccccttgtcagcgattatactccttacgccgaccttcaactaagatggactactctaccatctctaccgacccggatcatcctgtcggtacctcgccctggggatcaccgcatgttgagcgaggcgccttccccacttccagcaatgacatcccgtcgtcccctttacccggccaggagcaatcggcggacgttggtagtagtcacaatggagaaccccaatctccagacctctctgcgcagctgcagagcgcgcaattaggagacccggactatcccgaggagccattcagcgcgcaccagccttcaaacagccagcaacaactatctcctactctcgcacaatttcagaccggagcacgagacacacggccccccgctcccgcctatagaatccaaggaaaggtcactggtctggagaggacggggaagaaagacccaatcctgcgtttcgacatccacgtaggtctgcccctgggagtatttgcgcctgtgccatggctaattcccgatttttctttgagatcagaccaatattcccaaattccgcacgacccagtaccgtgatgtgcgtcggacccattccgaatttgtcaagctcgcagaccatctaatttccgccaacccggaagctctggtccctgctgtgccatcgccagtgacgccggccggcgccggcaccgaggaggatgagattcgcatcaaatcggcgatgcagagatggctcaatgttgtgctaagcaatgaaattctcattcaagacgacgaggttgtgcttttcgtggaaagcgacttcggctatagccccgtactgcggatgaagcagccggcaacgggcgtgcgacgaaagatgttgaagcagtttgcgccgcctccagatgacacacccgagttgcaagctgctcgcccaattgcgaagatgttttacttggcatcaatggatacgagccacaaggtcgaccgagttgtcaaggcccgtcgtggtacgttatcggagttttaaactgttttggtcgcatattttgttccgattaaaactgacaattttttagggcttggattggctgaagccgatttcggcgtgaagctcggtcagatgagcgtacaggagactcatcccggcttgggcgccgcttaccgtaaacttggcaagattgttcagacagttggcgactaccacgctgttcaggccaccgcggaggctaccactctcggcgaaccgttgagttaccactcttcagacgcctttattgtgaaggaaaccctcaccaaccgccatattcttctgcgtgatctactccaggcccaacaaagtgcacggagcaaacgtgccgcagcagaccgcttgaaggttagctcatcggtgcgtccggacaaggtagatgaagcgatcaacgctcttgaggaggcccaaaaccatgaagattacttgaccaagcggacccagcgtgtcacgtcaaaccttctccaggagaagcgccgctggtttgaccgcaccacccaggatcttttatccagcctacgtgagtacactctccgccagatcgaagctgagcgccgtactctggccactttggagagtgtccgacccgacattcgtgccattgacgcttccggtggtcttagccggctgggtcgcgaatcccacccagcgatgcgccggccaaacatggcttcgagccagggccctaagggtgattcgtggagcggtgttcctcgccgcaatgacaacattggacgcagcatgagtggcagctttactgccccctcgctccctgacgatgatgatgaggagagctctaataaaggacgcaaccgagcttccagtcaggttgggtcgattgcggaggaagacgatgaccgtcttgatgcgcgaaatgcagccagcagattggccaccagcacgttctgatcgtattttgggacgcaacgagtctgtacatgtagccccggcacgaactagtgattcccctttgttcctcttataacttttcgtgtcctcctgttatgttatctcctatgcacaatcagtatccttttcaaaattgattatagttgcaattgttctatatgactttctaaatgcatggtgattaggttccctgcaccaacatgaggcctctcgaatgatatcaagtcatcaatactacaacttctcatattccccccacttatcccacttcttcgtcccatccccctcaggtaattcaaaccaagacgccttctcactaagaaagatatgatggcttggcagcgggatctttgtcttctcctcgtcgagggtccccgcagcgattccgatactcttcggatcacgatgcaggagcatactgagagtcgaaccgcatttgggacagaaggtacgcgtagcggcctgggttgcctgtcgctctgtgggactgacatgccatcggatatcgtcagtcgcaaagaatgcccaggtttgatagggtgcgccggcttgtttgcggcaggttgtgcagtggcagtttaccaggcaggttgggggagtggaggccgtgtagccgatgtaattacaagcgcagctgccggaagccattctcggtacttggatgttggaaattgcaggattgcgaaggtaatcgcgattctgacatcatgtggggtatcgaagctctacatataccaaatgggcatggacgtgtccctctataattagccactttgtacgaattacagagttgatttccaatctgtacaacatcccctcatcgtcccccacttggtgctcgggccatatttgatttccaagcgtctcaacttccgatcatacttgcttcacttatttctatctgcgaaatctttttcttcttcattttccaattccaccatgtctcccaaggttttcgtgtaagtcattccggtgtaaaccgagcactcaatctaacgagtcctcacaggactggcgcaactggctacatcggcggcgacggtctgtttgttattgctaacgcccatcctgattggcaattctcagccctagtccgtagcgaggaaaagtccaaacaggtcaccagccaacacccgcagattcggactgtgatcggtgatctagactcgtccgagctgatcgaagaggaagtcaagaacgcagacattgtcttccgtacgtttattcaaacttatatatcaggatatcatgtcactaataacatatacacagacttcgctaattgcgatcatgttgccgcagctaaggccattgccaagggcgctcagcaccataccgccgagcgtccattgtggctgattcacacctctggcactggtatattgacaatcgaggaccagcgcgctggcacatacggcattgagcggcctaagcagtacaacgactgggagggcgtcagtgagctagtcaacctcccatcagacgccttccaccgtaacgtggatgagatcatcctcggggttggtgagcagaccccggccagtgtgaaggtcgcagtcgtatgcccacctaccatctacggtcttggccgtggccctggtaacacgaagagtatccaagcctatctgctcggcgctgcggtgctgaagcgcaagcggggcttcctggttggaaaaggcgagaacgtctggcaccaggtccatgtccatgatctgagcaatgtctacctggctctgggcgaggcagcctcggtgggaggtggcaaggctacctggaataacgagggctactacctcgctgagaatggatcctttgtatggggtgatatcgagcgtgcagttgcacaggctgcttttgataagaagcttattccttctcctgatgttgagtctctcgatggcgctcagacgactgaggtactttctgttggtacctatgcctggggctctaactcccgtggcaactcaatccgtgcacacaagctctttggctggacacctcagaagcctaagctgattgatctcgttcctgagattgttgaggtagaggctaaggctcttggcttactgtgaactcggtcttatgttaattcgtgaaaacactatgaaattgacgtattaaagagcacaatgtttgagacctttgaattaggatatgcaaattgcaatgtagtccagtgttgttttgatgtgttattcctttcttcgatgtttttgaaaggtgtggggaacattttaacactaggccacaacaaaaacctcgcttcctgtttaggccatattcgcagttcgacaaaaagaagaaaaagaggcaaaatagaatcgtcagcactaggactcgaacctaggttcacgaatgaactacttgacggaaggatcataaaagaagccgttcgaaagtagcgccttaaccactcggccatactgacttgataagaaaattggcaatcttgtgcctactagcggctgcacttgacctcttagtagggttagacgcctaagacctcctgccaagaattcaggtgtttaatgtcagtaacatctgctggtgaagtatccgctagacttaagagaaacccgacatagttatgcagaccacgtgcgggccttattcaatataaacaatgttacaatatttacccatatggcaatatgaacaatgacctattcacctgttcagctaattattcactctcatttaacggcttaatcaattgtagcttctattgttcctttaattgaagagctaggtcattattgaagagcttgaatggtaatcaataataaatcaataaggcacacatgaactcttggcgggggcctcaggcgtctagccctctggaggaagctttgaccatcagcatcttctgtcttcaccttacacgcctttggcttctgcgaccaccttgtactcaacggaatatctttgctggtacgcttgatatgcgcattatttcccttctttacttatcccccttcattcgccgcgggcgcttacattcattcttccgggctcctacagaaacgactgcatgagttgcaacctttcagcgtccagttccaccgtcgtaacccctcgtgtctaacacggctacctatcatggcgcctgggtacggacatggtggcaagcggaaacgcatcgatcgctcatggtccggcgagtcagggagcaatgacctgcgaccttcaccccatcgccctgggactctcaatatggcacatcaccctaccaatcctggacatcaatcccccactcctcgagagcagaatgacacacgcgacagatctcgtcgacaatcgcaccgcaaccgggctggttcccgccgcggatcccacgatggtcagaatttttcgaattcgcagcacagagaaccgaacgcgatgtctcctcccgcaataaatcagcccagggaacttgccgaccccgtgccgtataatggcgattcggccgcgtcaagacctaccccttctcccgcgccgaatactcctgctccgcagccgcaattcaacccgccgtctcgagctagctcagagactgtcaccccccacccctctctcccacccccgccttatgattacgaatatgtgaccgatagcgctgttgaggaatgggcatcagcgggcaaacaaaaggtagtcggagaagggactgcggctcgcctggaacaggatctggctcggcttgcatctgtctaccaggaacttattcactccgcgatctacggtcgactatcaccatcgcatgcgggaaatgctgtcaaaaatatcatcggtgaagaatctgtgtcccaggatgtggatatggatagtgggaagcctttgaccctaggaatcgatccgcgctccttgttcctcgatacgctttccatcgtgactgacgctgacccctcgaacgcggccctcaaaccacttgtatttgcgacaggtattgatccttctttaatgcgccttcagcttgaaactccgttgttgcagtccctagggctggttcgcgaaacctttgcgcgaatgggaattcgaaagcagaccaatctgctctaccgacagtccaactacaatcttcttcgggaagaatctgagggatactcgaaacttatcaccgagctattcaccacaagcaacaatgagccgccgtcgagtgaagtggtcatggatacatttgaaagagtcaaggctatgattggcgcatttgacatggatgtcggccgtgtgctagacgtcacgctggatgtgtttgctgcggttcttgtcaagcaataccgtttcttcgtgaagcttctgagggttagctcctggtggccgaaggaagaagccgtccacagactagagcaaggctatcgtcactccggtattccgaattgggcacttccagggtcaactggatggatcacaaccgacgaggaacgatccgctactatgcgcgcgaatgaggagcgtgacagccaattctgggatcgagtgagggaaatcggacttcaagccttcttcgagatcggccgcaaaccggtcccaggggtggaagtgcaacgcaatctttcggaaattaacggttcatcatttgaagaagatgccacacgatcatggctcgaagagactggcactatacccccgaagggcaaccgggttgcagcacagctgcttggtttcaaattgcgattctattcttcatccgctcgaaccaaagacgacgttcttcccgacaacctcatttaccttgccgccttgctcatcaaagttggctttatctctctgcgtgacctttatgctcacctctggcggtctgacgacaccatggagattctgaagaccgaaaaaatggcagaaaaagccgaaagagtgaaggctagccgaccaggtggcggaatcaacgctttgatgatggccggtgctttgtcggacgacacaatccctccttcccgcttgcgcgacgagccgcgagtggcgacccctagtaaagaccaagaatccgacaagggcaccgccaaaatggaaaacgagttgccagacccatcagaccagaaagtgctgctcctcaagagtctcctcgccattggcgccattcccgaatcccttttcatcatcagcaagttcccttggttgatggaggcttatcctgagctgcccgagttcatccaccgcatactccatcactctttgaagaaggtttacatccagttccgaccatcggtatctacaggtgactttcccggagctcaatacacggtgacttctgatcagaacaatgcgaagggccagatcggactcacgcccccaccttcgagacgagtactgcgatgggctcaactagataaagaagacaccaacgatggcaccgattaccgattctactgggatgattgggccgacaacatccccatttgtcaatctgtcgacgatgtttttgctctttgctcatctttcctcaacctttctggtcacaagattggacaagatgcgagccttctggcgaagcttgtacgcattggaaagggaagcttgatccaagacggatccgaagcgaacagaacacgttggcgcgatctttgcaagcgtctcctcctacccgctgtcagtcttacaaaagcaaatcctggtgtggtcaatgaagtttttgatctcatcagcttcttcccccgagatgtgcgatacaacatgtacgcagaatggtactcaggacagacgtcccggctgccagacatcaaggaggccttcgaccaggccagggcagagaccaaggacaccctcaagcgacttagcaagacaaatatccgacccatggcccgcgcattggccaagattgcttacgccaatcccggaattgtcattaatgtcgccatgagtcagattgagtcgtatgaaaatcttatcgaagttgtggttgaatgcgcacgctactttacttaccttggctatgacattctatcttggtccctcattaattcgcttggccagaaaggacgaagtcgggtccaggaaggtggactattgactagtcgatggttgaacgctctctccacattcgctggtcgaacttacaaacggtactcggtcatggaccctactccggtcctccagtatgtggtggagcaacttcggcacaacaactccaccgatctcattgtgctggagcaattgatcagctcaatggctggcatcatttcagacaacgacttcaatgatgctcaaattcaggccatggccggtggtgatgttctccaatcccagactatcttgcaactgctggataaacgtcatgagtcaaagaccacctccaaacggttgctcaagtcgttgacccacaccagaatcgccggtcaactgttggtcgccattgcccaagaacgactgacttgtgtgtacaatgaaacctcctcggagcttaaattgctcggcaatatctttgacgaaatccaccgaattctcactcaatacctcgacttacttcgcagcaatctctcggttgatgaatttgattcctttgttccggacttttcttctctcgtcacggagtttggaattcagcccgaaattgccttctggattcggcggcccagcatcgctcggaaaatcaacgacattgaagaatcaaaacaagagaaagaacgttcagtctctgtatcgaagtcgaacggcgaccacaagatggatactaccgaggacgaagaaaaacccacgaagtccgagactccggcagacagtgccatggatgtcgataaggacgaaactactccgaccgaaggacccgatgctatccttgcttccgcggtcaatgccgagccattggcagccaatcctgtcatgcaagatttgattgacgatgtcaagtctgctcttcctgctgagacatgggggaccatcggagcacacttctatgcaacattctggcagcttgccctctatgatgttcatattccgcagaaatcctacgaggatgaaattgacagactcaagcggcgagttgtctctatcaacagtgaccgatctgatcttagcgtggcgggcacggcacgaaaggagcacttgaagcgccagattactcagctacaggagcgtattctagatgagaataagaatcacctgaaggcgtatggacatacacgctctcggttgcagaaagagaaagacaagtggttcgccggcatgcgcctcaagcatgactctctcaatgttgccctgttggagcaatgcttcattcctaggcttctattgtcccctcttgatgcattcttctccttcaagatgttaaaattcctgcacagctctgggacccctaatttccggaccgttggtctccttgaccagcttttccgcgagcagagactcactgctctcattttcttgtgcacatccaaagaagcggacaatcttggtcgtttcttgaacgagatcttgcgtgatcttactagatggcatgccgataaggcagtttacgagaaagaggcattcggtgccaagagagaccttcctggcttcgcgaaaaacgtcgatcccgaaggtgttccagtgatgtttttggaattcgaagacttccggcgtctgttgtacaaatggcaccgcttgttctccaacgcgctgaagagctgtctcagcagtggtgaatacatgcatattcgaaatgccatcagtgtgctcaaggctgttgtgaagcatttccccgctgtaaactggattggtcggaacatcctgaactgtgtcgaccacctgagcaagaatgacgagcgagacgatgtgaagattcccgctgcttctctgatcggtgacctcaaccggcgcgagaagaagtggatgctgccacaggctttctattttgcggcagctcagcctggttctcagccacctggcgacgcatctggaacgcccgggactcctcaatctgctacaacagcgttgaatgcctcagccccagagttcaaccctactggatcctcaatgtaagtgacagccttgaccatttcgacatgctcacaatgactaatctttccatctttagctccgataatattgccaagcaggaacagtctggcaagactgaagtcgaggatggtgaaattgaggatgcgaaaatgaccgatgtcggtacaggcaagggcggcgaagccaggcggaccggaaccccctctcaggccggatctaccacgccgtccatgctcactggggaagaggctacatccggtgaacagccccctgtgcgatctcgaccaaattctcgtgccccgacttcatcccgtcagcctgatatccccaaaagacccgatattcgccaacaagttcatcctcccgttcgtcccccgccacgacacagcgatggaagactgcctccccgccccgagggattggatgaccgacgagagagacatcctgactttggaccccgcggtcgtcatggcccagatcataaccgctcctttgatggttctctaggcgatgtgcgaggacgtctcaatgagcatctcaatgaacgtgatcgtgaattccccatgagacctgcggctgatgatcttatgcggggaccacctcgtgattctcgttctactcgcgagaatggttggcctatggataggcctggtcgcatgcgtgggcccggacccaatgattcgttccatggacgtgatccctctgtgcgaggagagctgatgcctgaccacatggaccgcccagtcgatattcctcgacgtggagattcgtctagaccagagaaagacgatcgcaggccctatccgccacgccctctatcgccccctagacctgttgacctgccaaaccgccccgaccgattccccccacccgatgatcgcagacctgccgggtttaccccgtcctcccgtattgatgatctccccaggggccctcgcacggatcgacaacctgatccgagggacgctgcaccaggtcctgatatgactcatggtcggcttcggcagccggaacctccgtctgagattcctgccggcccccgaagacgcggtggacgcaatatgtctggacaggcacctccaatgctcagttcaagcaatgctaccttacctgctccggaacgccagacacctacgggccctgcccgacaaagtgggcgtggggcacccgagcaacccgctcctccaagccaaccagcgggctcaagcactgccccgggtattcacccagatcgccttagaaatcttgtcaatgaacctgcagcccccgctgctgctccatcgggtcctcgcggattaggcccacaacaaccacctcggggaccctctgctcagtctgggcagtctgggcagtccgggcagtctggaccgcctggaccgcctggacaaggcttcggtggggagcgtggccgtggtgataaacgtttcgcaggcctcaacaatgtgctccagcagtctggtggtggcagtggtgaccggggtgggaacactcctgttcgtggaagaggcgccaatcgcccaccaagcaccatggaggcaccatctcctcagcctgcgaaccgcccacccatgggtcctgcgggacctcaagaagatcaatcccgtaaccgatccaacggtggccgaggtggcgacctgcttgatgatgccgttcccgaggcgggtcgctctggatcaactggaaatcgcacccgtgaaacagagcctactcgcgagaaagaacccgagcgccgtgagggcagcagcaatggtcgcaatcgacgcgatggccgtcgaaatgaccgtgaacgcagccgtcgaagcgatgtaggaggtggcggaagccgcgacgacaagggcactggcgagccccgtgagactctgcgccgagtccagagctcacgcgaagagctgcgacgccgagaccgacgtgaccgcccagatggaccgccaggaataactggaccaacacctagcagtgagacccatgatgaaggccgtgtgcgacccacgtcctctatggaggcaccgccaccaccccctcctcctccacctccgcccatgccggaaggaaacgagcgtcgtttcaatactggcgaacggggtagccggtccgacaatcgggatcgtgagcgcgagcgccgtggcgaccgacgtgaccgggatcaccagcgtgagggtggtagctctgggggctctgggcaccgtaagcgtggtcgacagggccctgacgatggcactgacggtggacgcggcatgagaatgggaaatgataacaagcgtcctcgccgaggagcgtgatcctcaccatttaccatgataccccattgaaaggaatggaatttgcttttttttatgttcttttgctacaaacctcaagttcctctacactggactttctactgtttcctatcttgactttgcattttgcgtggtgtttggggaccaaccacttcacttcttcacatgtactttttcttcttcttctaaatgaacgtaactgaaatgcaatatccaaagatcttccatgattaataatttctttccatgtccgaggttctccgtactccgtctctcgtctctccaggctcagcggtccaatatccgacgtgccccgccctaccgtcagtcgggtaaacttcggttcgcaactacctccgtgcccctttgagagagttctcttgagagagcgagtggatgatcagccctaacatcttggaatatcatttgttcaagtcctggtatcatatatgtagccattgtcattggatacgattccacagcttccccgcctacacgggctggtttcacaatccgacgcttcatacattgaaggcctgaactctttagttttgcgtataaaagattgattctgttcttattcttcttttttctttttggacaacgagtgtatcacttctctgtcttcggagattaacaacctcgagcttattggacgcttcattctcccttgcagttgaacaagagcacaagcaattaatatacccccaaaagagaaaagagagctgctacatcatgcctcgaatcgacgttgagaaagccatcgaggagctcaccctcggcgagaaggtggccctcacagccggtaaacctgcttcctattgccaaagatccaattcaaactaacctcaccttaggccgtgacttctggcacacacatcctatcccacgcctaaacatcccctcgctacgcatgtccgacggaccaaatggcgtccgaggcacccgcttcttcaacggcatcccagccgcctgctttccgtgcgccaccgcgctcggcgcaacctgggataccgagctcctctcagaagtcggcgcactaatgggcgaagaagcgatcgcaaaaggcgcgcacatcgtgctaggcccgacgatcaacacccaccgctcgccgctgggtgggcgcggcttcgagtctttctcggaggatggtgtgctctccggcacgctcgctggccacttctgcaaggcgatgcaggagaagggtgttgcggctacgcttaagcactttgtctgcaatgaccaggagcatgagcgcatggctgttagcagtattgttactaaccgggcgctgcgggagatttatctcatgccgtttcagctggcgatgcgcatttgtcgcgcgcagtgtgttatgacgtcttataataaggttaatgggattcatgttagtgaggataaggctcttattgatgatatcttgcgcaaggagtgggggtgggagggtcttgttatgagtgactggtgagttacgatgggttcattctgttatttcggatgctcacgtttgatttttaattgtaggtttggtacatacagtacctcggatgctatcatcgccggtctggatatcgagatgcccggtaagacccgctggcgtggtgatgctcttgcgcacgccctctctgcaaacaaagtggcccaataccagctcgatgaacgagtgcgcaatatcctcaacctggtgaactgggttgaacccctgggaatccccgagggagcacctgagaaggctctcaaccggccacaagaccaggctctgttgcgccgcgctgctgccgagtctgtcgtgcttatgaagaatgagggtgatattcttccccttaagaaagatgggtctctgctggtcattggacccaacgctaaaattgctgcgtactgtggtggtggctcagcctctttggctccgtactacactgtcacgccgttcgctggcgtctctgccaagtccaagggagaggtcaagtacagccagggcgtgtactcccacaaggacctgccgcttctgggtccactgctgaagacggcagacggcaagcccggcttcacattcaaggtctacaatgaacaccccgactctggagaagaccgagaggccgtggacgagctgcatctactcgaatcctccggcttcctaatggactacgtcaaccctcggatcaagtcgatgacctactacgtcgacatggagggaacattcacgcccgaagagagcggagtctacgacttcggcgtgacagtcgtcggcaccggccaactcctcatcgacggcgaattagtcgtcgacaacaccaagaaccaaaagcaaggctccgccttcttcggcacagccacgatcgaagaaatcggcaccaaagagctcaaagccggccaaacatacaacatcctcttccaattcggcagcgcgccaacctccgacctagacacgcacggaatcgtcgccttcggcccaggcggcttccgcttcggcgccagccgccaagtaagccaagaagaactaatcgccaacgccgtcgagcaagccaaaaccgccgatgaagtcgtcatcttcgccggcctcacccaagaatgggagaccgaaggccacgaccgcgaacacatggacctacccccaggcagcgacgagctgatcagccgcgtgctagcggtgcacccggacaccgtcgtcgtgatccagtccggcacgccggtcaccatgccctgggaacacaataccaaagccctcgtgcaggcctggttcggcggcaacgagtgcggaaacggcatcgcggacgtcctctacggcgacgtgaacccctccgccaagctgccgctcacgttcccgcgccttctacgcgataacccctcgtacctgaacttccggtctgagcgcggccgcgtcctctacggcgaggacatctacgtcgggtaccggttctacgagaagagcgatgtggtgccgggcttcgcgttcggacatggtctttcgtacacgagtttcgcgcgcgaggatctgcatatcgacactgttcctgaacagagtaagtatgcggagtctggggaaccggtgactgcgtccgtgacggtctctaatacgggtgaggtggccggcgccgagatcgtgcagctctggatcgtgccgccggagacgggtgttggtcgtccggtgcgcgagcttaaggctttccagaaggttttcttgcggcctggtgagaggaagacggtgcagttggttgttgagaagaagttggctacgagctggtgggatgaggagcgggagcagtggatttcggagaaggggacgtatcaggttcttattacggggactggcgctgaggaactgcgtggtgagtttgaagttgggaagacgaggttctggctgggtctgtagggctgtggtatttttgtttgtgtttgtcgttataagaccatgtctcacgagtgatgttatttttaatctgtggatgggctaggttggcttggcatatggtcatacgagattttaatccacatgtttcggtattttgaattggattttctattttattgtggacttcagaaaaagtgaagcagacctagtgtttaagtagaaagtgggtggtgcaggctagagagcgatgcaatggttgggttgaaatgaacataactgacatgaagctgcgaaataaagtaacaaaatacatgaacatccccagaaaccagcaatagatatgataaatggtacaagaacaagaaaagacaagggtatctacatagaacagaatagacacctaatatcaaaagccacgaatacgcctcagggcaaaggaatcaaaaaaaacacctcaaatccctgcaatgcatattgacaccacaaacctcatgacctgctgccatcaataaactcattcccattgtcattatccttcttcctccctagcccagccaacttcctcagcaagagcgaagccttgttccgccggttgtttttcggagaaccgggcatagcaacagagtaaatacgctcctggtacatatcatctgccaagcaagaagacgagtaagacatgccacggttgggatcggcaaacggtggatataagtatccgccaggggaatcttcctcattcgtcgaagcactgcccaatctcgagatacctgtttcgggtctcgacaatgtctctcttccagagcctagtagcgaatccggtgtgactttgccgtggacattcaggtcctgttcctcccaataatccttcggcggccattcacgggagcgtaatgaccctgttgttcggttgcaggaactgtagaagcgcgccattggctttgcctgtttggcttcggttggcgcattttcgtcgatgagacaggggatgtctccgctcacgtgaagccaggttcggcctgtccagccgagaggtgcttcgtgtggggagatggccggggagaatgtctcggggatcgcatttgtgtcggtggcaatctcgtgtggatgtgtcttgagctcggactcggtgacttcgaatcttttgtcggtgtcattgagcgagctgactgggctgtggagtgttgtgggcttggatgtccatgtccactcgctgttcatttggagaggactgtagaatggaatcaagcttggagagcaagctcgccccctttccttatcttcgattgttacttctaggctctggccccgggagcgggtccctggtgatgggctatgtggcggtgaggcagagggttgtttgttatagaaccgtgctgaaatgttggtgcccgacacgctgttgcccgacggtctccttttttgactgggcgaattgatcataccaacgccggaatcatgtctcttggtgctgtccgcttggagattgatcgccgacagaagaacgacatgctgttttagagatgaaggagctgcgtcgacactgggctggggattttgtccgactgtcacggcgctccgataagacaatccagctggcattccacggtcaatgctgtgggatagcatagcgcatgcatgcttgatatcatcttcgaggtcttcttcgatctcttggcggtcgataaacggtgatgcaggacggaagtagcccggctcatctgtgaaactgtagcccccggagggaccagggtccctgtgccatgtgggctcggcgtgggtgggagactcggggtttgttgctgaccggggacgactgctgggtgggctgacttcaatgggcgagaccagtgttggttccagagcccgcgcggagttgcttctggtgaaggtcagacggtggcgtatttgagatgcttttgctgatagcttgcgttccatctcgtaacggtttgtctttgtttgtgtctgatggtcaagcaaacaatgaaaacgaaagagagatagaggaaagtgcgccgacaatcagtgaaaatggccactgattccagggcagtccactgcagcccaaacgactggctcagatcagatccaggcaatttccaaactatgtgaggtcgtaagagggaaaattcaagaaccgttgtcggcacaactgtctggtatgcggggggaggggaatgcagagcaggaacatagtagaagagagaccctgggaatacgagataataagaaagaaaagggaaagatagtgatcttactagtagttctgcacagaactatcgtccacttagataacactcgatatcccctttcgggcctcgttcctgatttctacacaataaaattggaaaatctaagacattcctatccaaagctatctagttcacccggctaaaccagttagataggttaataacgcccatatcgaaaagggtctaagcgcccagtacacatgtagttagagcagcgtgctagtgtgactcaaatcgaggactttttgcgccagtgacatctagacgagtcttcgcagcagttaattacttgaaccacggtttatcagaaacatggcctatagaccaggtgtatattaggtacaacatagcctgcgtacctgaatccaaccgtaattaatagcattaacagcagaataacaaaagagcagagcagaataccctgggccctgaaaagccccgggccgccacctaatcttgtttctgaccattcagctcgggccaagttatcttcgccctggagctacggagttgcggatctacgtacttttgtccaggtcatcttctttgtcttcttttctgatttatttttctaaataatgcgtgcatgtagagataaccaatggctatcaataccgaaaacggacccatcactccccgaggtatcctcccgggggaaattgacccggtgggtcggatggagagcagttggatgcttctttgacagtcttctcggacaaggacaattaccaagtgagagacgggagaggcagttggatgctcatctccctaactggcggaatggaaaaaagaacggcaaccctacttcccctgcgccacgacatctatccggtcgcggacccctgcacgggattctggacccagttagagcatgggattggctgcagaaatcactgcgcctgacaatactttttttttttttcgccgctttaccaagcggtgatatcctccacctcggcctcgccgaaggtgctgctcttggtcagcttagtgacactggccacagcggcaccatcgcctgacttggccatgatatcgggcaggacttcgtggaagaattcgacgatgtggcggttgacttgctcaaattgaagcaggaacgcgtcgtggccctcggggctatcgatgcgacggaggcgagaattggggatgccagctgcaacctcttcttgttccgcgaaggtgaacagaccatccgactcgataccgataacaagagctggctgctctacgcgtccgagcgcctcagctacagtatcctcagtgtcggcgctggaattgccgcgccggcgggacacgtcatgcgtgtcgagcttgcgggtcatggcgatgtagcagttggcatcgaatcgcttgacgaatttgtcaccctggtaacgaaggtatgactgtgcagagaagtaggtcggaggacgaggacggccggatgcagtcagcttgggcttttcgtcgacctcaggggcgaatgttttggtgccagagaattgcgggtccatgaactggacatcggccttgtttgcaggagccggtgagccttgtctgctctccgaacgtgaagttgtcccgccacggtgtccgtcgttgtggatggcccagtgctcgttcgggggagtggggagcctctcggtgccgttgatgttccgcggcttggttggatccggtacattgcgaccgaaccgagactcgaatgaattgcggctacggtaagtgaggagtgctgacatgcgagcggcaccgaggccggtggctggcggatcgttgaacgcatagtagccatcgtcatacttcgggtcactgtagatgctctgtcgctgtgcctcgccccaactaatgcaccacgcggaatgacgcgccgaagtcgcaatgggcacaatagctcgcacatagtctttgccgaaaaatgcgtattccaaggtgagcattccacccatggatcctccaaccaccgcagcaatctgcttaacaccgaggtcgtccagcacgagtttgtggatgttgacatcgtcacggacagtcgttaaggggaactcgggtccatagtagccattttcaggcttaccatccttgtaggtcacagcacttgcactcccgtacgggctgcccagactgttaaggcagatcacgaagaaccgggagacatcgaatgcttggccaggaccaccaagaagaggaccccaccagtcagcgacatcggcactgccactaagagcgtgacagatcaccagcacattggcgccattaggagcgagtgttccgcgagtggtgtatgcgaccgggacattatgaagggtaacaccggattcaagtttgaaggacgggatgatcgcaatggattgatcctcgatcaactgggcataagggttctcaggttgcgaatcgactctctctacgggatttagtagcggttcattgggaagaattgggagggatagagtggaggatagactgacggtattgcgcagtagaagcactgctagtatcagccattgtgaaagacaacaatttgcaaaatgaagaaaaacacgaattggaaaatgagaacaggctgtacttgtaacaaaatcgagtgagtcaaaacccccgcgccttggaataacttggcttccggtcccgctggcagaaaataaagcggtatttagtcacgtgcgccacatcacgtgccactagggctcgctccacacttgaccttatttttcatctgtgcgaattctcttcctccgtagccaaccatccaacaaaccttcttacgagccaacccctcaaaacattcaaaatggtcaagactaagaagtccggtgacaccctctcctcgcgcctggcgcttgtgatgaagtctggcaagggtacgcagcttttctcgatcgcacaattgagcaatttgctaacattttctctcagttaccatgggtaccaagtccaccatgaagactctccgctctggcaaggccaagctggtcctcatctccggaaactgccctcctctgcgcaagtccgagcttgagtactacgccatgctcgccaagacccccgttcaccacttcaacggcaacaacgtacgttccattcccctttccttcgggtcggcagcctgaaaatggctgtcgcacctcggagtcagctacactactcagagaagaagtggtcaaaactaccacttcggagagtgaagttgctcagcgaagggattgccgaaaggtgtcccggagagcgaattggactaactcgccctatagattgagctcggtaccgcttgcggtaagctcttccgctgctccgccatggctatcctcgatgccggtgactccgacatcctgagccgtgaggcttaagcgtgtcgccctgttgcgagccataaaaatagaatcttgaaccattcttgaacaaaattttccacatgaataatgatgaatcacggatcttccaaactaggcatattctagacaagtgccaagatactggaccgcttgttaaatgcgcttgtcctcggactcgccatttcatagaaatagcctaaatgtaataccaaaaatgcattctattatcatgagtctggccgttcatgtctaaattagaccttatctataacacctatacggcttcgtggcgctgatctcgatcctaagaaatcagcattgatgtccgtgccagatcaatccccacgcaactccgcaatctttgcggggaagcactgtaagtacatacagcctgtattgcttggcttggacagaccactcatttagcctgaagttttccgaggaactatgtgccaccgacgagtctcccgatgttcacgagcagttccatataaaggaggaacttgatcttcagtgagtgatcaagtatgaccagaaactttggctacaatgcgtacacttctcttttttgtctccttgggctttgcagccgctgagaatggcctcaatggctggctgcggtacgcatcattaccctgttcaggccaatgtcattacaatctcccttccagtatcagcatcctcaatgcgactgagacaagtccggtgtatgttgcagggacggagttgcagaatggtctcaagggtatttatgggaagagtgtgcaagtcacacacaactgcaatatatcctcagtcgttgttggcacggttgatcaatatcgcaaaagctgtggcgctgtgaacagtgtacctgaactggaagaagatggcttttggctcgacacgaaagggggcaatgtccaaatccttggacaaaatgagagaggtgctctctatggcacctttgaatacttgtcgatgcttgctcagggaaacttctccaaggtcgcctatgcaaccaatccttctgcaccgattcgctgggtgaatcaatgggacaacatggatggaagaatcgaacgcggctatggcggcccctctatcttcttcaaggacggtcaaatcgtcgacgacctaacccgtgttgctgaatacgcccgccttttggcctcgatcagaatcaatgctgtcgtcattaacaatgtcaatgcggatgctaccctcttgaatcccacaaacctcgacggggtggctcgaattgctgatgtcttccgtccatacggtatacaagttggtctatcgctcaatttcgcatcccctcagacttatggagggctcagcactttcgatcccctcgatacatctgtcatcgcgtggtggtcgaatattacgactcaaatctatgatctagttcctgacatggctgggtacctcgtcaaggctgactcggagggacagccaggcccccagacatataacaggaccctcgcagatgcagcgaatcttttcgccaaagaagtccagccctacggtggcattgtcatgtatcgtgcgtttgtctacaatcagctgaacgaatcagtctggacggatgatcgtgcgaaggctgccgtggaatttttcaaggatctagatggagagtttgacgacaacgtggtgatccagatcaaatacggccctatcgatttccagatccgtgagccagcatcggcattgtttgcaaatttgttcaataccagtatggccattgaactacaggttacgcaggaataccttgggcaacagtcgcatttggtctatattgctcctctttggaagaccatattagacaccgacctccgtgtcgaccaccagccatcattggttcgcgatatcgtggctggtaaacggttcaatcgcagactaggcggatcagcagctgttgtcaatgtaggcacaaacaccacctggcttggtagccacctgtccatgtcaaacctatatgcttatggtcgcttggcttggaacccggcagacgatgcccaggacattctgcaagactggatcagactgacctttgggctggaccgcaaggtactcggcaccatcactcggatgtcaatggaatcttggcctgcctacgaacaatacagtgggaatttgggcatccagaccttgacagatattctatacactcactacggtcccagccctgcctcccaagacaacaatggctggggccaatggacccgcgctgaccaaaccagcattggaatggatcggacggtggcaaacggcacaggtttttcaggccaatatccggatgaaatcgctgccatgtatgagaacatcgagaccaccccagacgatctcctactctggttccaccatgtgaaatacactcaccgtctgcactcgggcaagaccgttattcagcacttctacgacgagcactaccgcggagccgagactgcacagaccttccttacgcagtggaaatcgcttcatggcaaaattgatactgagcgatacaaccatgttcggcacttcctagactaccagagcggccactcgattgtatggagagatgcaatcaatgacttttattacaatctttctggaatccctgacgagtccaagcgggccggccatcacccgtggcgtatcgaagcggaagatatggagttagatggctacgaagcttacaccgtcagccccttcgaaacagcctcgggctcagttgcaattgttacaacttccaacaatacagctggcaccgcttcaaccaaaataaaatttccctctggcacctatgaccttgctgtgaattactacgatgtatacggcggccagtcacggtggaagatctatctgaatgatcacgaaatcggccaatgggttggtaatagtgaagatgtcttgagccacacaccttctatctatttagatggacattcggcgattcgtatcaagttccggggtgtcaagattcataagggtaataccttgaagattgtcggtatgcctaatggcactgagttcgcgccattggactatgtggctttgctgccagcgggtattgtagattagaagcactcttgtctaccttggctacttctctaagtgcagtgtttcatccaactaactactgtatgacaatcttctgaagaaaagtggtggtaatgaagcaggtagtgacacagtttatacaaagcaaataatgtaccacatgtgtaacattcaaaatctttctatccactagaagtactatgtagtctcagttgagataggaagcgaagccatcctcctgtaactatcaatgtcccttttctttctgtgcgtcttaaccgtatgaccgcaatgctagtttacttcagccgctggtttatcagtctgctatagatagtcgatttatgtgcttgaacaaacctatttggactttcttaaatctctctcaaatctctcagataggtcttatgtttcttgattgtttcaaatgattgagaggaacttatacgttgtagttgtccggttaaattgttcaatattgacgctagtccatatatggctagcgtcctacatcataggcgcgcatttccatttccatcgcgtccccatattcaatccctgcgctccaaccaattgtcttattccttctgaaataagcaactggtctcctctcatacaaagttgaattttcccatcgacctttgatacggagaatttgtcatcatgagtgactattcatcgttgaaagtggctgatttgaaggccgaatgcaagaggcgcggcgtctctcaggctggcctccgcctcaagcagcaattcattgacaaattgattgagcttgactcacagacaaaccaggttacaactgcagaaacaactccagcagaagaatccaccgcatcacagccatctgcgccggatgctgtttcgcaagcgacgtcgcagcccgaacaaccagagaacgaacagcttgaacaaggaaaggatgaatcaatctcacatattggtgaaataacagcacccgtttcagtgtcagagcaagctcaaaatggacacacgcaggcagatgagccgacccaagcagatgaagtttcggcagcagatgggaaatcgcaaaaagttgaagacgtcgcaaagcctgccgagacacaaacagagacaattagccctaaggatcacagtgttgcagccgcatcttcccagccaccaatggaagaagcaacccaagatgcgaagaacgaggaccctgcgaacgctcacgaaaaaccgatctccactgcccagacttctgagactgacacggcatctctcccagtagaagaggcattggaggatacacgcaaacggaaacgccgcagtcagagcccggctcctagtctagaggagattgcgaacaagaaggctcgcgcaaaggaaacaaccccccgcgcgttgctgaaagacgatgaggtgtctgcttctcgcgacgaggcgctcggcgatttgaagcctgaagaccagatttcaacagagaaccacacagacaagcaacctatcgagacccaaacagattcacacaaaactcccaccaagcaagatgctcggttccgcaacctatttgcacctaccagtgcatcctctcaactcacctctcccccgggagatattacaatgcaagatgtagaaataacccctgcgttgcaccctgcaacttctgccctctacatcgacggcctcatgcgcccactccagccgactgcactccgcaaacacctagccagcctcacttccacccccggaacccccgattccgatgatattattgatttctatcttgatgctatcaaaactcactgttttgtaagcttcaccagtatcgcggccgcctcgcgggttcgttccgccgtccaagggactgtgtggcccaacgagcgcaaccgcaagagccttcgagccgattttatccctgacgagaagatcaaggaatggattcagactgaagagaaatcccgagaccgcgctggcgctgctgcccgttgggaagtgagatatgagaccactgatgacggaactacggctaccctcgccgaggtgggctccactccctctggacgacgtgaatcaggtttcaatcgtactcctcccttgggcccgcgccgtgatatggaacaatatggccgtcgcccctcatatgcgcctcccgcggctcccgcggctcctgtcgctcctgtggcccctgtggctcccgcaccctcgtcacgacctggacagggcttcaagcctctggatgaattgttcgaatctaccaccaccaaacccaagctgtactaccttcccgttccacgtcccgttgccgacaaacgtctggaccaatttgatgagctgattaagaagggaacattcccacgtcctggtggcgacgagatgcggcgaattactttcgaagcagaggataagttcatcgacatcggccccgaacgatttggacctggacctcgtggacgtggacgtggacgtggacgtggcggacggcgtggggattcctggcggtcttgaactttcgaatgctcaaagcattgccattggccatgtacaatagactcctagcgtctgcaaataagaatccaatgtcaaaaaatatgtagcgccctgtattattcgcccaatacaacatatattgtacgtgttgggtccactcaagcggttaaaaatagatcatagccctacaacataaagaccctttcagcttccggtgatccctaggatatcggcggattatgaagagctgccagattatgcataaccagtccacaacgtcatctcctttcctcgcttactccgggcttcgtatggaaatagttgctgcttcaatattttcttgttgatcaccggtggcgtcttcccctgtcgatccggataagaagataaaggggaaaaaaaggttcactccgtcaaccgtcctctttgccattttcaccctagcagccatcatgggctggccagtgtgtaataccacagagaccgaaacaagtgtgttgcccctccccccgcgccttaatagggtgactgatcggaaatagttgaggagatcgcactctgggatggtggcatttcatttcatctcctcgcgctcttgatgggcggcgcttgcgctattatcgcctgtcttgtatctttcgccctgattatgctacatgcgacacattacagcaagccgatcgaacagcgacagtaagtgcgcctctctagggtagcggttaaggcatcccaaacattgctgacatggtcctcgtccccgcagtattatccgcatcctattcatggtccccgtctattcccttgtcgcatggcttagcatattcttctaccaggactccgtctactttgaggttctcggcgactgctacgaagcgttctgtatctccgccttcttctccctcatgtgccactatatcgccccggatctgcacagccagaaggaatacttccgtgggattcatccgaaagaatggctctggccgttgaattggtttcaaaagacctggggtggcgagcgcctctggcggactccgcgcagtggattgacatggttcaatgtaagatgatggacttgaccagatgtcgggagttttagaatactgatcattgtgcagattgtctgggtcggggtattccaatattgtgtcatgcgcgttcttatgaccattgttgcggttgtcacgcaggcttttgggctttactgcgaggcgtcgctgagtcccgcgttttcgcatatctgggtatgtgaccaagtcttgcgctttatcctgtcgatccactaataacctattgatagaccatcgtcatcgaatcggtctctgtcaccatcgccatgtactgcctaatccagttctaccaacagaccagtcaagacatcaagcaatatcagccatttttgaagatcgtgtcaattaagctcgtcattttcctgtcattctggcagtcagtaagaattttcgcgtcatcttctgataaagtgatttatttattaactcgtatttactttagacactcatcagtcttctagtttccgagggtgttcttgcatcgactgaaaaaatcgccctgaacgatttcaaagttgggctcccggagctgctgatcaacattgaaatggctatatttggtatactccatctctgggccttcccatgggagtgctacgccctctataacctgccaagtgaagtgaccgatttctacggcaacggcaaggtggcatatcaaggtgggcgctacggtgaaagggccttgattgatgccatgaacccattggaccttctcaaagccatcggtcgaagtgcccgctggctgttcgtcggccgcaaaaatcgtatgctggaccccagttatcacgtacaagaccagtcactgggcctccagccaccccaagatggccgcgaactcacccaacacggaactggcacgcctggaggcgtaatgggccgctatggggaccggccctacgaagaggacgatgtgcttctggccaacgcgcaatccaaccctgagatatcgctcacgggcacttcgccgtatgcgtcggacctcgatgagttccaaaacccgccaacaagattctacgagcgaagcccgtcatcttatgacgattccagtcctgacaatctgcagtcggaatcgccgatccgcgtttcctcgcccaacggtcctctccgcgagcaattccctatacccattccggatccttaccatcctcctcctccgtatcatcattcatgatccatgtctatgattcaattataactcagtatagacaacacatcttatattggcagggcttgctttgtatgcatgtttcccctgttattgagctgcagatttggttcttttacctcacgctacccatgagcacttcgagattttttgcgcttctacttttttctttttgtcccgttgtttggataggtatggatacccgcctgttgcatagcggcatgtttttgttttttttttgttctattcttattcccttattcctttcattattctttatctgctatatccccatcgacgcacattctcctagtatcgttgaggttatatttcttgtatagtatcgtttgggcttgacttctagtgtcaccgattggacaaggaaaaaagaggaagaaatcatatcgaagttcgttatttcgtctaaatggccttgaatgggccagaaatgaacactgtctaagcaaagcaagtgaaagacaaggcccaagatccggcatattaccatttggggggtattttcatgggctgatcgtggaaacactcaagaactggctatcacgaatacatcccacttccaggacctccacgcccacctgggccatagaaatcctcattgaagcccctttggagcatggaggaatccttgcgcgcggtggctacgtgacgcgcagtctggatgactgcagatttgcggcccaattcgcgcatagccttgacgttgtcgccaagttggccaagtagtgagatcaataggacgtcgttgctttgcgagagtacttcggtggtgaaggtgctttgctctgacggagaaaggatagagaggtgcgagagaagagagttgacgttgcggaggattgggtgtgacagcttagtggcggatgtattttcctttgatcgatctaagctgaaatccgcctctgagagactggagaggtaggatttgatgagggagatgcgggattcgagggtgcgaacggcattgagacgagtgctgaggcttgcgattacttttccatcggttagtatcaaccatccatgctgcagttgtgttgagactgtgaaaacttacactcttcctcctcttgtgagagttcaacctgcgagctctgcttatttggctctttctgttctttctgcttcgcacgcttggttggctcctgtgtcgcattcaaagaagcggtgccagaggcctggacaatagtatcgataccaatcatctctgattctcccgtttccattgagtagggcagctccctgaatttgatattcggcaccgactcctcgccatcaacctgcatgtccttgcttgcatcgggggcagtatcgccttcatgaacactttcgtacacggttaggggaagtttgccgctatttgaacttgaagcctggagctgtgaagggtggaaggcgaggaagacggcagattcgttgtagtcctggaggatctgtcgatggagggggagatgggcgtcattgggtccagtccatggcgcggttgaccaccatccaacaaggtcgagcgcggggtctttgtgcacatccttgactgtaatatggtcagtttgtactcgctaagaggagacctaattgatctcgtgaggggtttcgcgtacactgctgaagacgttcttcaaaccatgccgccggcaagataatctcatcgttcagtccacaagtaactggacactcgaacgtttgctcaagtgttatctctcgtccattctgctgacctaaaagagcgccgattatcggcccatgctgctgtcgggcagcgtgtcgggtgatttggtcggagacagtgagaagaacgagtgggtgtagctggatatggagacccgaatcggatgacttctgagaaactagactctgtggaggctccatgactgtaggcaatcctgggatgcggaggaacttgtggtgaatgactgagtagtagagacggttagtcgatgcggtcatgtttggtcggcttggtgttgatgcctgaggctgatacgagctttccccgcggcgggggcgcgaaggacgagcttcacctgtcacgaaggcgtccatctcagtttgaagtctgtgaatggtttttaaaagaactgaagatatcccaagaagtcacaatgtctgtcccttcaacctttgatgcagtgaaatcacacctcgctcaagtccaggagaacccctccacggctttggacattcctctcatcgacaagttgaagttgcaactagtcgaaaacaccgaccccgtagtccctgccactcttctgtcgcaaatctcggcgctccttcccatcttgcaagaagaccctacgcctattacaactctcggcatccgagccaccgcctacttcacattcaccaatctccaatctatcgatcccccgatcaatcttgtcgctggcttcaaggccccatcaccaccaatcaacctcctagctctttcactgttagctaaagccgggcagaaatacagtgaagctgctatagttgctggtgattcggatttggtggcttcactcgtggagctatggctttcaacatcttcgggcgaagtcgcacaggctgcacttgacacattatgggcgcttttggaggttgacgttgcgaatcacctggaaactggggaatatgagcatactggtaatgcaagtcatgcaggacagggactattgtggaggagggtattcactgataaggatgtctacggtctattgttcgggctatgcagcctccagagtgatgcccctggtgatctttctaaaggcgaaagaacgatcgcacagggcaggctgatgacactcttagtgaaagccggaagattacgctgggacatcatctcaaccacccaagtaccggaaatcgaggccaaataccagagcagtagtctccttcattttgcaacctgtcatatggtccaagtgagcgatgtcttgatgtatatgacactgctcaacttcttccgcgagctgctagagatcgatggaccgggcctcgtcgctcgaagatctgtgcagtctacttcgactttttcgtcccctgccctcgacttccttgtcgaacaccaactgcattctaaagtgctgagttattatctcgatgagtccaagctagactcggtggatcttatctacctatccggcccaatcatggcatatgtggctcgatatgccgagatgtatcccaaccacttgttgcagaacccctctaccctacttgacgcgattatctcccgcatcaatagatccctcgccattgctagtgcacaatgggcacacggcgaagtacccacaggtcaccttgctattttagcttcactgccccgagtgcttctcgtagaggcaggtatatatggtgccaacccggttcttgcaattcccacaaaccctccgaatagtgaagctctgggcgttctggcgaaaattttccacggacctcagcgaactggaatctctgattcaatgaacttgaacacatccggctcaactccaactgactgggaccgcgaagcagccgcagcgcgcatcctctacttcctctatgtcaaccaacaccccactttctgggacaatgtcgtgggtgctgccgacgtcctagtgatgaaagatgttgctttgtcggctatttctttcatgggggctattacaacagcgaactggaaactctcaccttcagcacccgccaacaccgattcatcgcggttccagctgccctccgaaaaggatctagatcagctatccccggctactaatgggtttttccccacctctggagcatgggcagttctcactccacctgccctaaccacccttcttccatatcttttcaagccacctcgctcctacgctgatttcgtcgggggtggtgcagctgattcccagaatgtcgtttggaaagttgccactgcgaaacatgatgttatcgtagcgctgcacaaccggttgcaagaaacagatggccaagtggaagggtttgaggatatcatgcgaaccctccaacagcgtgtgaacgagggtccccggggacccgtacaatttggcggtgctgaagtaatggctgccgggctatgaagtcgcaataaatttgaaaagcacatgaagcggtctagtttgttctcgtgtattctttctcgtgttcaattaagaacaatatcaagctcaagtctattgtagatgtactccgtagagatctgcattgttatcttagcgcggggaagcatttagagaatctgccagccctagtgctgtttcgggtgggcggtgaagaaatatatttttccggagtcatcatctatccgcagttatttcatgaagaatattccatattcgctaacccatagtaagtgacgttttattacggcaattatgtcacgtcgtggggcgccaaagggcaagaaaccccccggcacagagtttacttgggacgccgaccctggtggggagccagacacagctccaacgccgttataccctgtatgtttgcttcttggcctggctctccaggaaattttcatctttcaatccaatccccaccatgtcgaaagctacagagcctaacgccctctttcctcagaaatatactgtcccctttgctcggaagttgagccccgcggaacaaacccaggtagactactaccgagggttgcgcgagagctttcacgagggtccctactactctgttctcgatgcgtcatcttccaacgccaaaaaaggcagcgctgcgcgcgccaactttgacgctttccacggcatgcccgcttattctgggcggtatcaaaagaaacggcgcactctccccaagatcaccggacgatcttattgtaagttatttttaccagcgttaatcatttcttttccacggctgcatatgactaaccccgcatgcttgaaccactcagtcttgaaattcttcccccgcgagctatggcaaaccctccagccaaacttccgacccgacgcgtccctagatggctaccaggcccaggtttcagccgctgtagtgaagcgcggcttcgaagatgaagaagacgatactggacctgcgaagcgcgtagctgtcggcgaagacgaggatgagggcgatgcagatgcggacgaagccgcattgcttgatggggatgatgaacaggaagaggaaattatggacgacgacttctccgacgatgatgatgaaatgggcggcgattacaacgccgaacagtacttcgatgacggagaagacgatgtgggtgatgaagacggtggaggtggtggcgacgatgacttctgaaaagcagattcacgatacccttttttaattttcaatttagccttactatggctcttcagcgatctggtttatgcctcattggcatgtcctgtatatctatccaatgccactgtgaattattcggtgtgctgagcgcagataactcccagtagcccaggcttagacctaagattcttaacataatacaatcatagaattaaattatcctcaatgtctatatattcaaggtactcttacgaaacaatgcatccgatataaccttccgatgtcggtggtagataaggcggtgggtattcgataagaaaggttgattgggcttttgatgacgtcagccgatttttggaggggcaaagcagaaattgttcagacacttccacatcagagcgcagaatgggcgacacccaaagtctacgtcccttagaacggtctgtgctcattctctatggctccgaaacgggcaatgcgcaggaagtggccgaggaattgggcgccttgactgagcgactccgttttgcgacgcatgtatccgagttgaatcaatgcaagccggtatgcacttatccgcaagacaatgatcctctacagacctaatacctctgaaattataggagtcccttttttcatacacactcaccatatttgtggcctcgactaccgggcaaggcgatttgccggccaatgcgcggtctttttggaagtcgctcttgttgaaaaagctacctgctaccttcttgaatggcataaatttcacttgttttgggctgggggatagctcgtatcccaagtatggaacctataccacaattgtggttttcaatggctgattgtgatagattcaactgggcgatacgcaagctctataaacgactattacaactaggcgcaaatgagatctatcccacaggcgaggcagaccagcaacatccagaagggtgagtactatcttgatcttcacgctatatgtccacgacttacgtgggtttgacacacagactcgagggaactttcctaccatggatgacggacttccgaaaacatttgctagatagacatcctctccctgatggacagcacccgatcccagacgatgtgcagctcccaccaaaatggaagttgcaattagcggtggaaaacgattcggccccaataccccaagctgcagtcgcaaatgaacatcaagcttctacggatgaatatccgggactataccatctggaccatgactcccgacctatcccacatacgctatgtgcgacattgactgaaaatcggcgcgcgactccgcaaaagcattggcaggatgtgcgccacattaccctgaccgtcccaggccttgtctcttacgttcctggagacatgatcgccatcacaccgaaaagctcttcgattgatgtccaaacccttattgatttgatgggttggaacgatcaggcagatcgaccaatctctctcgttccaatgggagatattccatcaccgccacccattcctggcctcgactcatatcccaacctcactcttcgcgctctcctcgtagactatctcgacgtcaagggaataccccgccggtccttcttctcgacgattgcacattacaccaacgatgaaatgcacaaagaacggttactagaatttacaaatccggaatatctcgacgagctatgggattacacgacacgcccacgacgtagtatacttgagatcttgcatgagttcgacagtgtcaaaattccctggcagcacgcaatatctgttatcccggccatgcgcgcccgccagtttagcattgccagcggcggaaaacgcaagcagactgctgatggcaatacacagttcgaattactcattgccattgtcaaataccagacagtaatcaagagaatccgcgagggagtctgtaccaagtatctttccgtgctccggccagggagcacccttcaagtccagctccaacccggcgggctcaagtcatcagttcagcaactaaccgcagcaaccgtgcttattggaccgggcactggaattgcacccctgcgctccatcctctgggagaaagcggcacttgtgcaggcttaccgcgagcaaaaccctgacgtcaatccaccgatcggcccgacaattctcctatacggaggccgaaaccgagaatccgacttcttcttcgaggaagagtggacggagctcagtaagctcatcccgctgcaggtgattactgctttttcgcgtgatcagcaacgcaaggtctacgtgcaagataccattcgcgagaacttcgcgctcttcttctgtgtgttgcatgatatgcaggggtcggtttacatttgtggttcctcgggccgcatgccgcaagctgtgcgcgaggcgctcatcgaaaccttccaaaatggaggagctcctttgccggggcaacctttcacccgttctcaggctgagggctatctcattagcatggagcagactggccgttacaaacaagagacttggtgatcagtttgaatacttggtttacaccacagcatagtatgacattttctattgtacatctagttgtacatctagttatggaaagatgcccttggatatgtacgtaaatcagataggaggtcacaacctgtatctacaatgcgatgtaatgtcaaagcttagacatttactcattttacagctcattatcatgaaaatatatatctgtctatcttgcatgtatttaatgatgacattgtctactctgtacctaaatagctagatgttgttctctggctgcctctagctttggtatacaatgtcactcttgtccaaattctttaacagttcaatggcggtttggccgagtgattcaagatgattcagtcacatgtggtttgcggggatagctcactagagaactacacgaaagacatatatgttagggctaggcgttgacacaactatacaattcatgaccatatcaacagactacagtagactattcttctcagtcttgtcaaatgcaaaacaatatccatcatcacaatatgcaaaccgctggctgtatggttaacctcggcaggtcggtcgtgtgactacggcggagaattgcggccgtcggtaacccatatcacttctatagctagttaaccgccgcctttctatatttcgtggttatttcttaagagaaattgcttgtgttcgtgagccgctcttgattatatcgatttgattatgaacagaaatggtgatagagcgtgcatgctacatacaaccagctccagtgctccagtggggtgtatagaagatgagattggaaaccagtaacacataataaaagggatgtttttgtgttcaaatgagcattcattgctccgtacatagtttctttgctgtattgccctcttgtatcctcgaataatacaaaaaggcaaggtctatggtataccgccatggcatacttatagatacgttcgttgtacaacagtttccacagagcgttattactcaagggtagataatttggaacggctatctagagaagtctagactagcgtcatatatcccagaataatgctcaacttacctataggatctgcgcgggcggcgttcatgctccgaccccaagcgcttgttgccatagtggccgcaaaaacgagcggtatattgaggaatccgtggcgcgacgaggttaaactcgggccgcgtcggcgttttttacctcttggcactccgtcaccgcacgctttctccctccgagcttccaatcttccttatatcaactcaggaattggctgttgctcgactaccaattacaaaatgagtggcttaaggatattggtgcccgtcaagcgcgtgatcgactatgcggtaagtcaagttcccattcaactatagcccctccaagtacagctttgcgcgaccgtcactctgagctgtacctctcaaccaacagggttgtcatccctccatagcactcactctgggattgggatatcacaactgacaccaaatccgaatctaatagatcaaaccccgcatcaacaaggcccagaccggtgtcgaaaccgctggtgtcaagcactctctgaacccattcgacgagctctcaatcgaagaggccatccgcctgcgcgagcgcaagggacccattaaggtcgaagacatcctcgcactttccgctggcggcccgaagacccctgatgtcctccgcaccgccatggccatgggcgctgaccgagccttccacatcgacgtaccggagaagggcgacgctggcctcgagccgctgacaatcgccaagatgctgcaggctgtcgttaaggagcagaacgtgaacctcgtcctgctcggcaagcaggccattgacggtgaccagggtcagactggtcagatgctcgctggtctgcttgggtggccccaggctacacaggccagcaagattgagattaaggatgaggctggtaccatcgaggttacccacgaggtcgacggtggtgttgagactctccgcaccaagctgcctatggttatcactacggatctgcgcttgaacgagccgcggtacgctagcttgcccaacattatgaaggccaagaagaagccccttgagaagaagactcttgccgatctcggtgtcgaggatgtacggaagttgaagactgtgaaggtcactggtatgtgtttctgggtttgctatttggttcgtgggattgtgctaacattgtgtagaacccccgccacgaaagggtggtggcaaggtcgaggatgtcgatggccttatcgctaagcttaaggagctgggtgcgttgtagatgcgctaagcttgctcttgattacactgcgtttctataccttcgcctttgaaatgttacctactagattggaatcgtcttgcgcatttctcccacagtttctgatgggcatgctttgtggcgaggcatgtgtgcatctattggatgctagatctataaatgaaaaacattctttgtatttgatagtatgtactagtcccactagttccaaacgggttggcgttgtgttcaatgatacatcttccctaagcatatagtcatagttcgccaaagggggccacactagtgcaaaatcgaggatcgcaatccgccacaggggcgctagagtggctagatcttgtctacggactaggaactatgcacgaaataataaccaccccgtataggtatggccatatacaatatatcttactcttccaaccttgggaggtctctttattggcaaaactacccaatcggaactctatagcgcccaatttcatctcagcccgaggcaataatatacaatttatcagccacattgcctaacttcccgattggctgtgatggaatgtcccgggagcctcacagctagaagaacattcttaggattgagtgaaattgcaaaagtactaaggaaggatagtatgattctctaattcccccattaggcttaagtacattagtgtagatgtgttatgagatcagcgcaaaagacgatcttgcattatattagttacccttcacagtgtggatacactagaatatggtggtggcgaaagctcagctgaagtgatatccaatctcaaataactgctagtacaaatacggagtatatagggaaaacctagccgacggatgcgtacggaggcatggccttatagcgtggtcgatcagctcagcctagttgagctgtcatgtatgggatccactggggcttgaaggtggacaggtcaaagaacaaatgaacaatgacaatgtgtttcatgttccgaggtattctattcggcagagaatactgagtactacagcatatcggtatatgtagtcaaagtagtctagaatggtaggaaatgcctcgacacgcgttctaccagggcttttaaattttcccggtgggggtatgaggtatgtgattagggactgactatgtatggattaataagagtactatagatacctacgattcgtataaatacataaataacatacagagtacaatatcgattgtcactgcaaatgcaaaaaccaaatgaaaaaaaccaaaaagcgaaattaaaaattaaaaaaccaaaaaaaccacctgatccgtggatgatgacattgcctcgaaccttggaaccatggaagagcataaccgtccaggccctattaaacccttccgtctgacccggaaatcttttttataacttccttttgcctcgtcagtcgctataatctcgcctttcacattttcgacgaactttctatacatttgcgaacattcctccccgcattcctggcttgcaaccgatctcgcattcttcgatctagctggaaacattccggataagaatatatcgggattcatgctgttcgcggcgcaagtcgtgtttcagatattgcgagtatagatctcgccttgatcagcctctcgcggcgcgaagcgcataacctttgctacttcttcagttccccataacgtcacagcctcttctgtctggcagcaattcgttatgtcttctcaaaataaatgggagaagacgttgagcatctcgaaaaagggctttgacaaagcatgggacaccgtcgacaagctgggcggccccgtcaaccgcctgtcacataagctgggtgccgaagccttctggcccatgacaatcgataaggaagccgacaaagccgcgcgcatcctacgcagtttctgtaaagatggattctacgcccccgattcctcaagtggcaccgatgagaatggaaagatcaatcgccccaagggcagacaacgcgttattcagaagatcccatcaaaagtcctcaaaaatgccaagggagttgccattttcacgactatgcgcaccggtctgtggatgagtggctctggtggtagtggcgtgctgattggtcgcatccccgagaccggcgagtggagccccccatctggtatcatgttacacacagccgggataggcttcctcgctggtgttgacatttacgactgcgtggtcatcatcaacagctatgacgcgctcaacgcatttaagaaattccggtgcacccttggtggcgagattagcgctgctgcgggccccgtcggtgtgggtggtgtcctcgaatccgaagtgcacaaacgccaggcaccaatttggacatatatgaagagcaaggggctgtacgcgggtgtcgcggtcgatggcacgatcatcattgagcgaacggacgagaacgagcgcttctacggcgagcggatatccgtcgacgaaattctctccggcaaaatccgacatccaccttacgagctcgctaccctcatgcaaacattgaaggccgcacaaggcgacaccgacgtcgacgggagtctcattccgccaccgggcgaaacacctggcgatatggaattgacggaagacggacaacaaatctttggcgtgccggctgtggacgaccccgatccgtatggagtgaaggcgctggaggcggaggggcttttcatccgcgaggccggcacgaaagcgaggcccagccatgagacatttgaatttcggcctaacctagacagtcctatttatagcactttctcgcggcgcagtatggatagctcgccgcgtaatagctggcgtgctagtgtgcagagcgccaagagctatgctagtgtcaaccgtggcacgcaaacgattgatgagccgctggtcgagcccacgtctgtgagccgtgcgtcttcccgcaggtcgaagggatcgtctattggccgtcaaccgatgaatacctgggacgaaaatgagcctcattgggatacgattgctatccatggcaatgaagaacacgtgaaggtccgccaattggaaggcgaggaggcggagcataggagagcgaaaacggatgcctgcccagatgcacacgatgaccccgcgttcgaggatgaagacgagcactttgagatccacgagcttggcaatgtcaaggtcacaccaatggagattgtcccagcctcgccgtcgaaggtggaagaccagacgacaggcaagcctacatcgcctagcttcacccgggctcgtctagtcacaatcccggcacgcaccccgccccccttgcctccgcgacaccccggccacgtccggggctctggctcaagccgtgcctcaatgtcgccaacagcgctctcatattctagccgtaacacctcacctacagacgccaccgaggtggtggagaataccgaacatttggatgaaactccccacgccattccattccccgagaccaagacctctccccatgtcactcctgcgagcgatgacgaggagattgtcgagaaggacgaattccactctgtcgacggcgagtcggaggatgaggataacgtcattctcctcgaagaccagattgccacccaggccgccgagcaggagaacaagatggacaaggaagacgagaagacaaattcactcgatgtccccaagcttggacctagcatcaaatatacccccgaggttgaagagaccctcgacgagatcgaagccaagcttgaagctgagatcaatcacattcctgctgtccacgaaaaacatgcagagtcccccgctttgactgaactcgataccaccttgccccatgcccgggctgagtgatcttagattctgagtaactgtttttctgcttcctctttgcgatttcctcggcattctcgtttccgtatttttctcgaaacacaccttggcacgatacctcttacgcattctatacacatttaactcatttgggagttcttggtcattcagtctccattttcatacttcttccatccccatctcatctccaaaaaaaggcttttctttgttggtttcctgccattggctttagcgtgtctgcattttagcgattggggggtattttttttgttcctgggtcaggccgatggtgaaggggttctttgggctccttgccttttactttatttgaagagctttcgctcgagttgcattatatcctgtttcctggacttggaatacgctcttttatatattggtatttggctaagcttgactttggtcggttgaattatataacatcagtaattatccagcgcaggtctattaaatgtacagcagcatgtctcatctcaagtagaaatcatccttcgaatctattatccttttccatgagaaagtagatggaattacccacgtataacttctagaaaagcatagctgatgctgctttagattgagatgcttcagttatgatagcaaagccttctagaggtggaagtaaagacaccgaggtatttatatcagtttgagccgatagagaaggctcgctcacagaagagaacgatcaaaagacagcgaaagtgtcatgtatgaaaataattaacccgatagaaaaaggggtgggttaatccggcggcaatatttaagtgaaccaatcacaggaattagagtaaacctcccggaaaaatggagatctacagatttgtatggcgccaaaggcttcattttcgacgatcatcggacctagttattccgtgccgacattatggtgattcggaccaacttccaggcattaaggctttgatatggtgcaaacgacccctgcgatgctgcctacttttctttcctcttccttttctctcctcttgaccatctcccctcattctctctccttgaccatcttaccccttatttccaatcctccaactgcatgaaacactcattcgataccacagttcgagcgaacctcgagcagtcactccatactcttttccggcttccgaactacaatatttgcaattgactgttcaaagtctcctggtctcccttgaacaaatgcaacatgacttcaagtgtcgcgcgaagctcgaaaggcagcattaagaagtgagcatgatggctggaaatgtttgtttattgttactaatttgacgcagaattcaaggaccaatagtggcaatcacggtcggggcatcaaaggaaccctttcatgtgcacgaatcaatcatctgcaattcttcgctcttcttcaaaacggccatgtcagggtcttggaaggaatccaaggaacacactttcaagctcccggaagatgaccccgaaatctttgctctatatttgcactggctttacttcgccgaaatccccgtgatgcttgaaaaatatgcagcgaaggaagaagcagcaaggcaccgttacaaggagtaccataatttcgtcgatgcatatgtgctcggtgacaagttgctcgatggcaagtttcagaattcaatcatcgatgcaattctcgagatgtgttctacgcctgatgcacacgatggaaggaaatactatcctagtatggcggtgatcaagcatgcatacatagttacgaccgagtctgccggaattcgcaaactgtttgtggatttgtttgtgaacactgcagcagctaagtggctcagcagagaacttccagcggaatttctctattcggttgctgaaggcctcatgattaaaagaacctcgtatggtgggccaatcaaagcatcccagtattatgctaagccctcgttattctaatgtggcaatgtgactaccccgggcttttctgacttcattctgacttcattcatcttcccaccttgttttgaatgatctctaagttagtccaggcaagtagatatataatggtcaaattttgtattcgtttcatttcttgaaagtccgtagctaatccagctaatcggtatattcatcttcgaccttggtttagccagactcattccttcttatagtctgcactggtgtgtctactcgagtccttacccctggaaacatggactacataaattagaaaccgccgaatgaagaatagatgccgtgatatccgacagtcaaggccaataatgcagatgtggacactggagatatgaaaattccgaaaagggaaagatatgccaggacgttacctcgttacctccgctaagtccgaaagcttgtgcaactttatttgaaagtatcatacctgcttgttccaaaaggacacatcctccgagattttcatctcccatcttttcatctccaggctcaaagcatccaaaatgccttcggataaccacatcaaagcagccttgtctctcatcgaggacaagtccaagatccttggcttgaccatcggcaactatgagaacgtgcaacctggaacatacctaccccgcaaaggtacgaagcagtctattgcctgacctccccttccccccccaaatcgtgtgacaggcaatccaaatatgggactaacaaaaaccacagcatgtcaagagcccccgaagctctccttcactggcaccaaccctaacagcacctacatgatcgtgagcatggacatcgatgcccccttccctggcttcggagtcctgggtcccatacttcactggatccagtccgatgtcaaagccaccagcgagggtgtgctggagtacgaagcgcccttcgtcgccaactacatcggccctgctccccctccaatgagctcgccccatcggtacaccttcttcctgtacgaacagcctgcagactttgatctcacggcccatgcacctgctggtggtaagaagcttggcaactacaatcgtatgtggtacgatcttgatgcttgggcagagaagatcaagcttggtcctcttgtggctttcaactattttaccagcaactagctggtttttgatgttaaccgggttatggtttgatgaagtttaaatgggaagatacgttgtttctcgtgatcgttttattctcgagtccagagggatctcactaattgtcagtcaatgaatgttgctttactttgactaaattaatcaataactccaaatttttcaactcaacatcctatactgtaataaggaatgcacatgtgtcttctcttgcttcttgctttggcagtaatagacaggagggcttctcgatgagccactcagcttgtaaatcatctactaggtgatatctcagccctcatacagccctcagcctcaggtttcaatggagaatcccgggggcttgaaaggaacatctgagattgtctttgtttattgtttgtctgtgccattattgcagtgtcatcaatagtttataagggtagtcaaattcccccacaaggaatttctgcgtttaatttcatgggtacttttcttagtgtggtttattttccatcggggaagatggcttccaacaaaccggtagacaagctggctgacaatctgaaggggttggtcatcggcgccagcggtacaatccctggatatcaacatggtatgttttccctcatatcaaagcagatctatggaaagagggagagagacgtttcctagatataatttgatgaatgacacctgttatccagaggaaatcaagcggatggtcgaggaatgtggtgcgaagtttgccgcgataaatatcaacaaatgcactcatctggtgacgacagaaaaaaatgccaacaaagatttgagaaagagttagttgcataagcttcgcattctgtgatataaagtgtctactaacagggtgattttgcttcagtcaatgtggctcgtgaactagaaagctgccaaattgtgaacattgattggctgcttaagaagatcggaaacgatattccagagcatggccagaaaaaaacaatcaagggcgagaggaatgaagagagcaagcccaaaggcagaaagcgtgcgcgagaatcttcagttcgggacgacgaagacaacccttcgaagagaacgaaggatgaagaacagatcaagctcaagtatctgatcagtttggttgatgagaaatacccaaacccgagttagtgatacgatggagtattttcgaagacctttctaacacttcggtattaggtagcacgctctccgtttaccaggacgacaccggtttgatatgggatgccacactggtcagccttggtgtgagaaaagtccaaatttgtcgcatacaacttctccttcgtcgcgagtcacaaaagttccacctgtggaacttgcagtaccaatgcgggtcatccgagacgtcaacatcaattggaagggtaggaagcctcgactcggtcaagcgtgcgtttgaggtgaagttcaagtcactcagtcatctagaatgggaagaccgaaatgatattccttcttctaaaggttggattttcctccagatgcctcaaagggaagttcccgtcttcaccagccggatcagcccgttgcctacaagcgttgaggacgttttgaaaatcatcttcacatcaggagcagacttgaaaaactatgtccatttgctaaacagtcaggggcgcggtatcttgcttgaaaaccaagtggacaagaaaaagctcctgatcgggattgcagtcttggccaagctgatggagctcaccaatcctcagctaaatccttgcgacacttacaaagcgaagaacaaactgtgcaacttctacaatcacttgattctcacacaagggactctttcggataacaaagatattgtcagacaggagttggaatccctcgatctgttactcaagttgcgcgatgccagcgagattctggaaaaagattgccggtcttcttcattggcgatgagccagatatcccaagtagttggtctggcaaaaatgctcccaggtatatatcctttgtgccttcttatagtaattccttgagtgcgttgcaaagcatgaatctgacccttgttgacagtgaggagagattcgacagagttcaagatgctccaggagtatattgagaaaacttcttattcacaacacatttatcaattcaaggtaagctgcgctcaaatgacataagcaaaatcccagtctaacgcattcatattcctaggagatcatcggcctgttccgtctcgaacgtcccggggaagcagagcgttttgcccagtgggaaaaggaaaaccttgctaacatcggagatcggcgacttctgtggcatggctcaaaagctagcaactttgcagggatcttaagccaagggctgcgtggcgacgggattgtcagtaccgatggaaagcgcttccttcctggggtatactttgccgacatgtctactaagtcgtcacaatattgcaaagggaatggggaagtcttgatgttgttatgcgaagtcgagctggggaaatccacggctttttcagtccaccatcttggcatgactgtccataataaatggcgcgatgctggatatattcacccagatttcaaggggtgccaagtgccagatgttcacgcgggacgatcaactacaaccccgaacggccggcgttattacacctctgagtatatcgcgaaaaacccagcacaaattcgtcaacggtatttgttccatgtcaagctcgttcaaacgccagggacttagggcgacgatgattgagggattcgagttaactacagaatgttgagattttcctatctggaggtatttagatttattttagttcaatgcaactttagaagctctatatctgcataatcccacctcacagacatcgggtagtggatgaatatgtacaacatagctagggcatcgaatatcaggtggttttgtcttggcacttcccctcccctcacttgcacgagcacgagccacattgacagaattgttgccagggttgtaactcttctctcggggtattcttttgcttcccacagctcgttcacgtcatgattaatttgtggaccgccgctctggtagtaagtgctgccgcgcagtactttccgcccatcccagatggattgaaggtggttgaatcgaagcatcagaagggagtgaagatctcatacaaacaggtgtgattattttgaagtcgttggtatcacataatgtcatactgataaatttcacagcctggaatttgtgaaacaacaccaggggtgagatcatactcgggttacgtccatctacccccaggctctctggacgatgtaaatgttgatcaagactacccgatcaatactttcttctggtttttcgagtctcgtcataacccgaaaaatgcgccattgtctatatggatgaacggaggcccaggaagttcctccatgattggcctcatgcaggaaaatggaccctgcatagtcaacgaggactccaattctacggaactcaatccctggtcctggaataactatgtcaatatgctgtacattgaccagccaaatcaggttggcttcagttatgatgtcctgacgaacggtacctttgatcaggttaagggtgcctggaacttgtcggagtggtccggggtgcccaagcagaacaacactttctacgtcggcacgacagctagccaagataagtcgactgtggctaatagcactgcgaactccgcgcggtcactatggcactttgctcagacctggttcaccgagtttccgcattacaagccccatgatgaccgggttagcatctggactgagtcatacggcggtcgttacggtccatctttcactgccttctttcaggagcaaaacgaaaagataaaaaatggcagcatcgatgcctcgggggatccacactatattcacctggatacactgggcatcatcaacggctgcattgatctcctagtacaggaagcgacatacccagtaatggcatacaacaatacctacgacatccaggccatcaacaagaccttattcggttacgctatgaattcatggggccgccccggcggatgcaaagaccagatcattcactgtcgcgcgctggccgcagagggcgatccgcaaatgcacggcaacaacgaaactgtcaacaaagcatgccacgacgccgacaagttctgcagcaacaatgtcgaaggtgcatacttagagtttgcagaccgtggctactacgacatcacccacaagaaccccgaccctttcccaccgtcctactacttgggctggctgaaccagcactgggtgcaaggggcactgggcgtcccgattaacttcacccaatcaagtgacggtgcctacaatgctttcaattctgtcggagactatccgcgttcagacgtgcacggctacctcgaagacctggcgtacgtgctcgactccggtatcaaggtcgctctcgtttacggcgacaaagattacgcttgcaactggattgggggcgaagacgccagcttgctggtcaatcatgctagtgcttctgggttccggtctgctgggtacacgcctctacgcacaaactcctcgtatattggcggccaggtccggcagcatggcaacttttctttcacccgtgtctacgatgctggtcatgaagtcccggcctaccagccacagactgcatatgagatcttttatcgttcgctgttcaaccgcgatctggccacgggtaagatcaatactgcacgtaatggctcctatgccacgcaggggcctgcgtctacttggcatatcaagaacaaggtcccggagagtccggatccgctctgctatatccttgctttggggtcgacatgcactgaagaccagattgcaagtgtgatcaatggcaccgctgttattcgtgattatgttgttgtggaggaaagttgaagtacctcatgtaagctctatgcattattgctcctcatgtattttactagaacacacgaaatgacatatagaaatgagtatacatcttctataagtgagacttgttgtgacgatgtcctcgtacgttcgatatccaatacactctttgcttgcagcgaaggcgaatatctcaaacataactggtcagatggctcggtggctgagtcaactcaagaaggtcatgaatagcacatgagtggatatatcgcatcttgaacacgataggagaattcgagggtttcacaagctgtcacagcctaagtgtaggttttgcatcgcatggaggtttgcgatgtctaggttcggcccgagccgtggtggcgcccgattcgacggatggcgggtctgaaaaccgggtctctggtttccaccaggtacataccgaggaagtaaagtaaagaagtctcctcacggtctaaagaaccctatggggttacttatatatgtccttgagatattcatatggtcgctgatctgtagagtcataaaacagacaatcatacagatggtaacagtaaccagaccggatcactgtgtttcagtatacaatcaattcacaatgctgtatcctccatgactgaatatgaaaagagcagtgatcttggcattgtcttgattgaaaccattgtatgcactcgtattataatttgggatgagagaattgtgaaagtcaagcatatgacacatatctgagacatcaggtagaacaatgaaactactatatgtgactgcaaactaagctacgatatcatatcctaaggaggaaggcacctgcccagtcccagatcaggtgccttcccttttggtcaaaaaccgtcaccaaccccagtttcctatttacctttagctactgggagggtataaatacctgcctctcccccctctccctcttcttctttctttcttctccaacactccgggcccacattgcacatcgtgttcctgttgagtaccctttaattttttgaacttttgccagctccagattcgtattcaacatacgtctgctgctgtccagtgaagggaaatcctgaggattctgattggaactttgctgcggctcgttgaaggctgaaactaggttggggcttcggtcctggtctaatggcacgaagcatgttacggtagaagcactctccctctgaccactgcggatacagactgtacttctctgagttctccattgtccattaggagcttaacaaaaggggctctgttctcatctccttcctacagggataactctctgttcccaatgatgaaacaataatctgagggtagaacgttccttccttcttcaacccagctgcacgggtcatgtgtgtagcacctgagcaagacttgcacctttacgtggtgttcaggatgagtagcctttacggcgaaaccaagcaagtcattatctagaacagctattaactgcaatattaaatcatcagtactcagtacaacattgtgcttcttgtaagaaaccaccggacattgaattattagaactagtatcaggtaacctgcaggtagagactagcgccagatttcccttgtgtcgatcatgttgatcagtcctatagatctcacactgacgcacctggaatgtgatctcgattgctgcacactacaatgcctaatctctccgatcacaagctacaacagcatctcttgcgacattctctctacttacggcgaaaccaagcaagtcctcattatctagaactgcaatagaacttggtattatatacttgactgtgtccttttgtaaatgcttctgtcgtaacctgtgccttcatttccaaggtttatgtaccgactctcatccatggatatcaaacttcttttcaaactgccacaacaaactgccatcaccacaaacaccttacattacagtgagtatcgaccagtcgccttctcttattcaatcatattctgactcctgaagtgttgcataagccttctaacgttggatattagacaacaaacctttctacccttagcaaattcaaactaaaatggcatttccacaccggttcggctggctcgcaagaccatcaccattttctacgcctcgacagccccgactgagtccaggcaagacgggacggttggtgacatacgatatcacttccgagatgcagtgcccactattcgatcggctgcggtgctgctttgagctggactttatgtgcggatttcaatctacatggggtcttcatgatcaacgctggactgaggatggagaacagttccatcgagagaacgaagaggcagcacgttaagagtcaagacactcatttctttgtttttgacactagctaacttagattcttgtcacagttactccctgttcagaaaccaaagccctgttcagactacgacatccacccggcccttttcctagtccccgacaaatgagacgaacccagccccgaccagagaatatgacagcaaccaatgtcttcatgtaattcaaagtatccatggtctttttacaaaacggtagccagacataccattggcaagaacatgaggccatgactgtgaaacttataccatcctgaggccagccatgacttacgcaaagcaccatattgtacgaatgagttcagtctcattccagaatcctcatttactgattatgaaacccttctcggcggcaagataccattctgaaagtacgccatatttgtcaatcacttgttcaggaacatccagtcctctggcgatgtactctaaaagtcaccaatatcaatggcgcttgcttctcattttcacagaatcacaatcgaagcttgccatcactctataactcgatagtagacttatgcatactgcagttcaattcaatgtcatcaccaggtcatgacggcaatcttgactactctctgaaacaatgatcttttactttcccctttccggaaccacacgcacgcaaaaatccggtcatgcgctaggaaccttatgcatgcattgtcggaactatacggcgaaagtaccctcgtttcttaatgctgagccctggtacacttgacatttgtctgctcttagttcgttcgctctatacctatagttgatagctaggtacttggtcttaggatgcgtagaaatggcaatgcttgtcaaatgagcatcagcacggcatcttacaagttcccaaggaggcagcgggactaaaggccgcatttggatgatgatatccattatttccggcagaggtgacagtcaatctcggctgggaagctgcttggacgtgggcttgttacatagatagacttctgcgcctttggcttttgtacatcagtcccagttggagagtatggtatttttctgtagactacattttagtttgtctatgcgaacataattaagttggaatatcgtgattgtggttctggatatactagttaaaggctcatcaagaacctcgtaagatgagtactctggaatcaagtaaaaagacgggggataaatgtcaacgctattgaataaaccatccatatcataaaccaatcattccttcttatcatgcgcagtctcgaccggtttactaccaacgccagacgaccaagcaacacgagcaagccgccaaagcacccagatgaacccaagagagatcaccgcacaagtaccaagctcgatatatttaccctggaagtagccctcctcgccctcaagtcgtagaaccggcacatcgatctcctccacaagacgatcacctgtaggctgaagctggtagaatagggttcgcggaccgaacaagctgtcccagcctagatgtgtgcggtcgaagggattcacactcatcttcgtgctgtcctcggaagtacaagcccagaagacgacaggccagggaatgtaagctgtgcggtgtcctgtttcggatggtggcaggtaccgcaggtgcagaggaatggtggcagtccagtttgaggaatctggtgtgttggccgtttcttcgagttctgggggtgttgctagttcgaagagccagttggagccccagcgctgaacaacccagtctggggcttccaggtccatttcgcctgctaaggcttggagggctaggagattgtgtgactcgaggaagagtggatctgttgtcgcgagctggtattgatcgccaaatatgacggaggggagggtgaggtatgtgtgcagaccgcaggttgtgtcgtctggtgctgtgggtcgtttgagggatgaccgaggcatggatatagacattgttgggtgaagaccagtcggggaggcgaaggagacggtgtagctcgatggttcagtgagagattggtgacgggaggggaatgagaacatagttggttctgtatgatggttagacaaaattcaagcgatctgataacgccgaagccacatacttagcttctcgtcctctccgacaaccgctaacagcccgcccatcttgatctcctctggctcaagccctgcctcggcgcccaagagaccgaactcgacttgatcgtcagcggaggctggcctttgaaacttatccgtccaaccgcccgtaggtgaactggcccagagcccagacacagttaaggcgtgtgaagtgctgtcatagtcgatatcgaccgagtccgcagagaggagagcatcggcccgggtgtggcactcgcggccacctgtacgactctggtcacagacagtgttgtgaatatatttgaccagcggctgtatggaagggagtcgggtgtaatattgtagagcggccgatgaaccgaatcgtgttgaaagaagcggaggtgtaatgaacgcatcctgtgtagcagattccaagtcagaatgaacacatgcaagatatggccagggaaagccctcgaaagaagggaacaatggcgaaatacctcctgcttcgaacaattcttatattgggcgtccttgctgggcgctactatcgtgcggagcagcgtgcacagtgcctctctatcgataaccaaatccgtcaatcgcatttcctccaagcctaagatgtagggatgagctcacgaagatgattccgatccgagcggagtataatggacatgcaggccaggcgaaactcggctactgaatggcacgactgcatcgaaagacctctcggaggcccagcgaaggtggagctcatgggattgctcgaggacagcacgcaactaaacacatagtaaccaggtcagcattgtgtaattcttaacagatcttcaatcgacaatgccttctcacctcctctgggagctcgtccagtccgaccgtaatgcgatcctcccgcgcagcgtctatgtcacggacggagagggatgacgtggttaacacagcttgctctgggtcgaaggaggcattgacgctctggatgaaggtgattcttcgtttcatggtttcgatcaagggatatcgagtggacagtaaacagaagtgacgaagtccaagattgatctctccaaggtgtcactggtttctccgcattcgctcaattgggttagactacacatatggacattacgttattcggtcacgacttcaccaggtaaaacttccaaggttgtatgcatatattgtacatgaagatggcttgtcaaataaaagataaaagtgcttattaaaaaattctcatacaaaactttgttcgtgtcattgtcattaaatacgccctctttcgccccaaacgccaggtatatgcaattagaccggatccttctaaggcagcacatcccggaggatatctttttgggagctagtcaagctagtggggaaagtgacgttggcgcggatgattaggtcgccgcgggtgctggggttcttggagatcaccatgcctagaccggggtagcgctcttcatggcccggctgggttggaccaggcttagacacgcgaattgattttccgtcgatggtgcggacaatgcgttcccagcctgtcagtgcttcctttaggctgagatcgaccgtggtaataagattgtcaccagaacgcttgaaagtaggatgatcgatctgtaaacggttgttagcaatggttcaagtgtcttcatagtaaggagcggtctcatacctctttaacaatgagatgaacatcctgtcgtcctccttcttcctgatctccaatatttctatacttgatctttgagccagcacgcagcccaggcttgatattggcttccaaagtcacctccttagtagtgagcctgccctgtttgtcaaaggccttgctcttcgtcttcaccttcttagaggtacccttgtagatttcctccaaagtaagaggcaagtctttctcgatgacagtcggttcaggggtaggtgcgcgcggcttcgagaatcccggacgactgctacggaagccgccgcctccaccgccgccgcccagtcctcctgcgagcatggagataatatcttcttcatccatgccgcccatgccgcccataccacccatgccgccgctatccttggcaaagctgcggaaggtatcgttggcatcgctgaaactgaagccgccgccaccgccagggccggtcgagaagtggaacttgcggcctcctccaccgcctggcatgcctccgggcattccgccgaagttgaatccaccgggcatgccgccttcaaagccagatgggccgcctccgcctgaccctggtgggggaggtgcagggccgccgcgcatcagatactcgaggccgaactggtcgtagacctttcgtttttcgggatcagataggacttcgtatgcttgagagacctctgtaatcagactgttagtcatgcgtaacaaaccgaaactgtgcgggataacgtacctttgaatttatcagcagacgaagggttatccttgttcttatccgggtggtgcttcaatgctgccttccggtatgcttttttaatctcgtcttgtgtggcatcaggcttgatgctcaacacgtcatagagtttgctctcggcaaccatattgcggggtaaggatgtgttttatgttaaaatgtaaacagcaggtcaaaaatgatgagcctcgaatcggaggtggacacttatgaaccaacgatgagggaaaagattcctgcgtggggggtgagggatggtacggtgtgcctctcgaatgatgtagaaggttcgaagcggaaagacggatcgtatgtaagaggaattgaggatttaaggagtgcggaaaggcacgggttggagatcatgagactggagaagaaatgaagctcgagaaaatcctgcaaggaactggaaaagtacttgaatgtcagtgaccaaggtggtctccaggtgggtgacgtcagcggtgaagtcttgacgtgtgtgacttgggcccatcgaagtttcgagaagcttcgatcgaacagcaactcggccaattcgacgagaaatgctcaggggaagggtttaaatactatttagaggttctgtagggtaatattgcttttttcaatctgtttcaggagttgcaggggactttttggctgcttgttgactgcgatctacaattctaccgtttgtggagtataacaacgaggatacaggtcccaccgaccagacattcggaggtacctatcttgatatatccattcatatctcgtattgatcatttatctccttactttcacaatgctttccgtggtgaaaacaaaaaaaatgaaatgaaagtgaagacgaaagaaaaggtgcgaatgggtttatagtggccggaatcaggaaaaaagggcttatcggtactccccgatataaacaattgggtatcaactccgaactcccgtcaaaccacctcaaatccccatctcgggtaaaggccatgggacatcggtcattaaaaactgatctaggtcaaagttctgcagactaggcatatcaatcatcaaatcacccagccacgagaactccgcatctgataccagcacgtctggcgcaacctgctgctgcctttcactctggttggctaacgcggtcggtgcaatctgcctatctttctgatcaaccgctggagccgccgccgcagcattgacccgcaacacctcagcaagagcacgtgtatcatcctcctttcgccgctgatgcaacgcaatcagtaggtatgccgtggaatacgcctcacgcatagaaggtgtatcataggcagcgaggacttcgcgcagagtccgcatcgcatcggcgagcagcgccaacgcagcccgattgtcaatcgctagaagtgagcagacaacttgaaagggaacattggcaacttggtgccaggggcagctggaggcgaccattcctcgtgcggcacggagcccgcggcctgccagtgcaagaacgcggtcaatgagattagaggataatgggccgtgtggatttagggcgcggagacggcgataaatgcatagcattaggttgcattggactaatattagcgagggttcggaatagaggagatccaggacggaggcgagggctgtttcgagttctgggagatcttgtggtgacggccctgttggatcgaggttttcggacagtgggaggaggtggaagagctctgcgcgtggggctcggggtggtgcttgctggggtggattgcgggattggggtgtgattgtaggagagggagctgcggcaccgtgaaggacaacgcgggagcgaccaaggtcgaaggaaatccatgtgttgagatgacgagccatgccaaagagtctttgcctggttacggggtcgctggttccctgttttatatcgccatcttgtgtctcgggcggtgatgtatgaagcaggcctgctgcttctggatctgaagttccaagatgtagtcctgcagcctcgatgagatgcatcagtgtacaactggccatccatgcagcatgtggtgaggctgtcatgcgtaaatacgcagcacgcaacacccagcctgtcactatgtcgaccgagggtgtttctgctgcgaggatagtcttatccagtagagtgcgcgcggtctcaatgagtcgaagttccactgctatgatctcgcgccgcgaaaacagatacccaaaggcagccacgccgcatagtacggcatcataggggtgttccgcagaatcattaggagatgacaaaagttcccagcgctgtacgattcgagtaaagaaaattttgcggtccagaaatgtatagcatggatcgatcttctcgaagtagattgctgctagccgccgcatctcttcctgtgtgataagtttggtgatagtcgtcggcaccgtgacaggcatcgagggaagggccgaggatagtgttggcgatatccgtctctccccgatgttccaggcaaacaattgcaatcgtggtgcatgagccgggtcaattctgagcccaagtttgcgaacaaacgcggcgccagaattggcctgtagggaatgagttacgccctctgaactgcttgtacagcggggagaagcctgcactgtagcggcctgttccatattggccgaggcgccgacggtatttgggactgcatcggaccagccatctgtaggccgttcactgagtgacaggctcgctcggtacagactatgcggtatggcgcgtttcttgcgcgcactgtattggcattccgcatcggtttgggcgcaagtgctacagggctgaccgcctgaacatttgcgctttcgtgactgacacaaagtgcaggctaaacgcgaacgctttcgaggcgttgactcggacatctttgaaaaaatacggggaacattgcggggggttgaaagggtagcatggtgccaagcaaattaaacatcttcccctttttcatttttgaactacacgaaacttaactacatcgatgtacgaggtacacttggtttttttcatctctttgccattcacatttcggcttaatcctcatattctcttccatccggatatctcatcatcccctcaagttcctttagatctggcattcccgatggccctggcatatacaagaggttttcccggagggtcgtgccattccaccatatttcgttcttgtgcagcgcttccatgatcttcggcgcgtcgatgtacgtgcggatctcgaccatctgaccacgataccaacgtgtgaaccaaacattgatgatatcgaacttgtcacctgtagtgggtcagcaactcagcaatgctgaaggcaggaagatttccttactcaccagaattcatcacccctttgaactgaatctccgccactgaccatgcagcgttacacccgccatagattccctgggggtggatttcaaacagatccgcatggtcaaaaaacaacatgctgactcgacgcagagcattgacgtagaagtgcattaggtccttgtagtgtccggcgattgggtgatgtccgacgacggtgaagctgacatttttgtggatcagcgtgaatagcttgctcatatctttctcgagatgtttgaacgagtcccaaatgtgcggttgagacgcatatttgcaatctgtggatgggttctcaaatttgaacccttctcggtcatggggtattgggtcgtccacaactccagtgccattgcatttgccatctgggtcaacaagtccagtgccatcatcacatcccgatggcagaagtgggctctggctgttgtctccggggattgagagaatggagcgtccaaaagtcgccgagggcaggagcaatgccaatagggcataggatagatattgagttaaaatcattgttcaatttttgcaatgagaacaccagaggctagctgtcttgatcattttccctcgtatacagcctggttcttatatctggtgctgcctgcatttcattaatgcgccgtatgcccgtggccgccagcgttgctttctacattgttaccctaagtgtaaaaagactctctgtgtgacacaaccaaacctaccgaaattttgtaattgaacggcgagtttcctatacagaagaccgggaattgagcgtatccgagtggcgaatggcgcgggcaaggtgcagggctactgcagtgtgccattggttgtggcaatagtgtggtgtacagacaaaatccaggccgttaaaccgcctcgatgggtgatatttcctatctttggctccttcgaatttatgtaaatgtgatgatcccattgaaaggctaaatagttctctgtgcctgatagataccattgtccaggccgaacccggcgattggatgagtcagatctaagccgataacagaatttgacgccctccgattggccgacaccggcaaagtcggtgagagcacgtgcccacggagtcggggtgaaaaacctcttgtttccttcttttccgtcttctttctcattatttctctactccagattttcaacgcaaaagatctccatgttgcgctaaatagcaaccccctcatctctctctaccatactctgactaccacctgctagtcgcgcttatgtgtttggcaccctcgatcttcacctcccaggactatatctcggaccacctctggaaagccaacatcaactgaacagtacaaagcttcctactgaattacaattgttacttataaaataaaaatgatctccaacctcttcaaggcaatgcctgcccgggcttctgccttcgcctccatgagccgaacctctggtcaggcccgcttcatggctactgtgcgccgtgccgctatggagcctgctaccttcactatccgtgatggtcccatgttctccggcaagtctttcggtgcccgctccaacatctctggcgaagccgtcttcactacatcccttgttggataccccgagtccttgaccgatccctcataccgtggtcagatcctagttttcacccagcctctgattggcaactacggagttccctccgccgagaaggatcccaatggacttttgaaatacttcgagtctcccaatctccaggcagctggtgttgttgttgccgatgtcgccgagcaatacagtcactggactgctgtccagagtctgggcgagtggtgtgcccgtgaaggtgttcctgccatctccggtgtcgatactcgtgccattgtcacctacctgcgtgagcaaggctcttctctggcccgtatcaccgtcggcgaagaatacgacgccaacgaggatgaggctttcactgaccctgagcaaatccacttggtgcgccaggtcagcaccaagcagcctttccatgttgccgctgctgatccccactcccacgttgctgtcatcgactgtggtgttaaggagaacattctccgcagcttggtcggtcgtggctccagcgtcactgtcctgcccttcgactaccccatccacaaggtcgcccaccacttcgatggtgtcttcatctccaacggccctggtgacccaacccactgccaggacaccgtctaccacctgaagcgtctgatggagacctcccaggtccccattttcggtatctgcctgggccaccagctcctcgctctggccgccggtgccagcaccatcaagttgaagtacggaaaccgggctcacaacattcccgctcttgaccttagcactggtcgctgccacatcaccagccagaaccacggttacgccgttgatgcttcgactctaccatcggactggaagccgtacttcatcaacctgaacgaccagagcaacgaaggcatgatccacaagtctcgtcccatcttcagcacccagttccaccccgaggccaagggcggtcctcttgactcatcctacctcttcgatatctacctggactccgtgctgaagtacaagaacagccagactggtctctaccctcagcgtgacagccgccccagccctctgctggtcgacctgcttgccaaggagcgcgtgggtgttcagcccaccattggccagcagaacgtggtagccgctgccgctgcttctgctgccattgccgctgctgcttaagcatgtcaacgtattgcagtaggagttctggtttttgagggttcaattggttgccttgatgaaataattttacttttcgtattttttgttcatagattcatgcatggcatatgaaatcaacagcattaagaccatattttcatgtccaagctctttgtagtcgtatcaatattttcatcatcgctttcgatctctaagttctacttagccactatagataccacatcctcatcagcaaccaaatgtcccaatcctacccgctgcggaacatgtctcgcgctcgctccccacaccaatgcatacttaaatgtgtccttaattgtgcgatggatctggtcacaaacatcctcaatggtggagtcctttcgtacgatgagcgcctcatcgaatttaggttcctctccctttctaaagatacgataatcatcagccatgtcaatgaacctaaagtcaaggatataccataccgttttgtgtaaagccgcattagtctcagttccttccagatgcgttcgacaacgtcttgcacgccgaggtcaagttcgcaactcatgacggctgtgtgaggttcgcgggcaagggcatcaaggaactcgaggccgatgctgtcgaccttgttgtaaacgtaaagactggcacaaaaggagaaatattagcgtttgacagttggatatcaatcatgattagtgtcaatcttaccagcggatgtacttccggtggtccttcataatcacatcgataaagtcgtcgatcgtggctataacggagccgcaattagtgtttgggcctggctgtttgtattaaagcatcacgtaccattctcatctcgcacgagcacctcgcagttgagaattttgtaatcccggagcacgttgtaaaccaacttttcatccaaatgctttgggggcgtagcaaaagagatcttcatgccaccggccttcttgattttcaagtagatattactaggatggtatcagtatttcagtctgcgcaaaacttcggatacggtataacatacgggggctccttgttcaaccgaatgcccacggcatccagctcggcctcgagcaaggctcgctgttcggcacgctttgtggcgtccaaaatcatcaagatcaaatcacttgtctagaagcaggaattttgtcagtgtttctgtactctctcctattaagaaagttagcccgctcacctttgcggccgaaatgacctgccgaccacggcctttgccctcggaggcaccttcgataatacctggcaaatccaagatctgaatctcagcgccaccatactccagcactccgggaatagccgtcagcgtggtgaaagagtaggatgcagcctcactcttggtcttggtgattttagacaggaatgtagactttccgacagaggggaagccaacaagagccactcgtgcatcgccgctcttgctgacatcaaatcccgcaccggggccaccgccagcacctcccactggctccaagagctgggctcttagccgggcaagttttctggaaagattgttagtttatatttgaaattgaagttagagaattcagactataccctttcagtagacccaaatggtgttctgatatggagatttggaaattaggtcatatcctcccctgatcaaaatgatatcttacctgttgccttgttctctgtgggtcattagcggggtgatatataagtctgaagataagaacacttactctgcgttcgacgcatctcatcctcgatcctgtaaaagatcagtaaattaggccatccagcaattaacaagaaactgactccttgatcttttccgtgatgttcaccatcttgtcggttgaggctcgtcgcctgtgaaatcactaaatatttttctctggtgcttcgttgtgcctcagagagggaaataccaaatccgatgtgccctggcgcacttgccaagccttatgtaagcacctcagttggaacggtccaagacgtcgaccttttttttgaagctcaagcttaaccttccaagtcaacatctccaacacaaacacgaccatggcagatacatcggttgctgagccaccagctcccatttccaccacccccgaaacccttgaagtcaatgccgaacagacaattgtggcaacaaccggcgcggacgagactgtgcaaggagagcagcagcttcagtcggtcaagaagaccaagattattcgcaggaagaaacgcccagcgaggatacaagtcgacgcgtcaaccatcaaagctgagcctgcacagcagccgggactcgactataatatttggtacaacaagagcggcgacaacgacgacaaatatggcctcagccagcctgcgcctagtcgctgcaatattgcgcgtgactcgggatacactcgcgctgatcgcattccgggctcctttttctggtaggaaattttaccattgcgcatcgcggtagacatttgctaatcctttttccgtcctatctagcatacattttgcgcgaggcgtctgcgtgaaaggtcaggactgtgaatacctccatcgtctaccgacgattcacgatatgttagtgattcccatgccgtacgcgattcgaggattcttctactctgttggactcgtcggatacaaaagaacctggctaatcaatgattcttaggttcaatccaaacatggactgctttggttagtctccttgctatttgattttaaaacaggcgactgactccagactatagggagagacaagcacagcgattacaaggaagtgagtatctctttgtgactaggagatgttgcttcgctatgaacatatcgctaacgctacttgaaataggatatgtccggagtaggctcgttcacacgccaaaataggacaatctacgtgggtcggattacggtttcgtgagtacctcgaaaggctatacttcgtattgttgctaatcaacatctagcgatgatatcgaggaagtgtgctcaaggcattttgcggaatggggtcaaattgaaagaaccagagtacttaccggacggggcgtggctttcgtgacctattcgtcagaaagtaatgcgcagtttgcgtaagataccccttcccaagctctctatttgtaccgaactaacatatgactaaagtctagctgcgatgcaaaaccaaagcttggatcatgaagtgagttcaacatttcaatccacaagatgtgttatacaaaggtactaacaacaagtaggaaattcttaacgtacgatgggcaacggtcgacccgaacccaatggcacagaagcgcgaggcacgccggttagaagagcaagccgccgaggctgtgcgccgggcactacccgcagcttttgtagcagagatcgaaggccgagatcccgaagccaagaggcggaagaagatcgagggaacttttggactacagggctatgacgttccagatgatgtgtggcatgctagaacccgtcaattggaggatgcgagccgggccgctcagctagaggcaccccaacaaccgatgatgatcgagtctgcttcggtttcggtacaggagcaggagcagcagcctcagagtaatggcatcttctccagctcagctctcgcagccctacggggtcttaatggcggaacggtgacgacccaggcacccaaggctgttggtggaccgttagtcggctacggcagcgacgatgagagtgactgatttacgtgcagtttgtgcggcatcctaatccatcatgattgtgaattttttcatgtacaacagcaacgatacctctgtcaaaatgtttatttctctctgcgtctccatacaggatatccgtaaaatattatttctgggcgtcattcatcatcactatgtatggtatcatcccgagcactcgctaaaacacaacattgagagcgtgtcaaccaaaacgaaatatatccacccataaaccaaatgcaaacaccacgagtctcatcgatccgagacttatgcttaacctaactccccttcactcttcctcccatgagatcaatcagtcgtaaattcatttctcgctagggtcccaggtcatagtatacgcaggagcctgtgcggtagttgtagatgaaagcattcgtgtagctttctatggtatcatttgtgcgactctccatggccaagtcagtgagtagctcatgcacttgactaagatacttccgctctgtcagcggtgcgttctggatcacgctgcgccagctctctgcgtcagagagacgcgtgtcgcgaatagcgtcgagaacttcgtcgcgggtgtcgatggctgcgacagggccgttgcgggcgttttcggctacttctcgagaggaaagaagggctagaacacagtgtatcaattagtatactggactggatccccacttgaagcctgaacatacctgactcaacaatgttccttcggttcgtcttcttgtttcggtgctgggggatgaggatgcgcacatcattggcccgttcctggaacgcgagagcctcctgctggctcaattgacgggactggcggggatcaggagttccctcgcgatactggcgcgcctgcacttctgatcgaagccactgcacaagttcagggaggcggatatcgaattcttccttgcgcatcagattccgaactttaaacccacgctccttgctatcttgcttggcgattacaatgcaccggtgattggagtctttgtattttgctagaagctcttcaagggacgaggcatcgactgcaagctccgcgcttatgttgttggaccagagttcttcgatcagtttaactcctgttgtacggaggactgcggggtcaaagctggcaacaagtacattacactttgaagatcagcaaatattacatcaaacgagttcggatggaagtcacttacccgacgggctgtccagtacaactcagcacttgtctctgaatctttcgacggagccttggcctttaggtaatcaatcatcgatgaccgtagtagatcggagccgaggttgaaaccaacagcatgtgcttgaggtcgatttgataagccatgaggtgagaattcctgaatcaaccggtcatatctgccacctgcagcaaacacgccgcgtcttttgctatcaaagatacactggaacagaatgctaccgcggtagaacttgtcatgaacgctgctgagtgggttgatataaatcttccgtttcacgccgaaactctgcaaataggtcatgagcacgttcaaacgagcgaatattggtgaaatccgctccgcatattcagttccttccatgataatctgaagtctgcgttttgtctccttcaatgagtctgtatcatatccattagcgtattgttcccaatatgagaaagtaagcttaagtacctctgaaatcgaaacgggcaaggtcatccaacgaagttgaagcaacaccaattgccggggcccgaagttcacttcgaatcttttgcatgttatattttccaacattcagcttactgagaacctcctttgccttggggatttgagtaggcgtgacgcgacaaaattccataataagctggagtagatcggagtggttgacgaggaagcacatcggagtagaccgcagaggtgggaattcctcaatgatttcgtccaaaactttgatcacttctgcctcttttaaggctagatccagggtgttgtgggacacaatatcaaagtcaacttcgcggtgagtttgtggttcgccaccatgtattgtatccctgtagactgtgccgaacgcaaatgtcttctctagtgagtgatcttgtcttggaattgctcgtgcgtttggaagtgtgagatcatatggcagctgtaaaagattgccagatgcatccagcacacgtactgcaccgttgttgtaatgctgagatcgaggaaagagcatttgccttgttgactcgacagcaccatgtcttcgaaatatcgaggttagcttcttcttaaccaagccctggacaagtagctcgttcgcggccggtactgcatgtgagtctatgtcccaagcaatatcttcgaatttcttaggcgactgagaaaagatagctgatagaatctttttgtagtcgggtgaatttggatccgagagcagatgcacaatagcccgtctgaatgtctcttcttcgacctgaagaggtatctttccgctggacaaaaggtcggaggctgtggggcgttcactcggatcatggctcagcagagattcgatgatctggccctggagcaacttatcagattgctggaaagcgggcggaagagtgtgattcttttcacgaatttgtcgaagagtttggtctcgttccatgccagttggcaatgaataacacatctcgaagaagattacaccgagcgaaaacatctagaatgcgtgagcaggtagtcgtgatgccagttgtatattcactactcacatcgactttctcattgtagtgccccgaaacaactgacttcatctccggtgccacatagtaggttgtacccaaactacgagtgaaatctccttcgaagtcggcggctgcggacgaacgcacagccgttgtgaattggccacttgttgcaagaccaaagtcaccaatgcggggattgtttgcaacgtcgatgaaaatgttgtcaggcttcaagtcacggtgtatgatgccgtgactatggatatggctcaagccatcgagaatttgccggaagagacgccatgaacgctcgatatcatcgcacaaatcatcctttattagatcgcgcaaggtctagggaatgttagtctagaacaacgagcagagcgatgttaaaacacttacatgtttctcacagtactccatctggatgtagagtgtcgttacgataggcctggcataagagccagatctcgctcggctgagctcaacttcctccacacttccggcatcaaagtcgctatcattttcatttaccctgttcctctctggcgtctctggataagcggggtcagataatgttccttcgttttcatcatcgctgtctgatgcggcaaattctatttttggatatccgctggagctgatgaaatcgaggccgcctgtactgaatccatggtcatggctagcaaacggatcaccttcggtggaggacatagcctcttcctccacgttattgaagtcctcttcaagccaagcagcgtagtatcggacaacatagggatgattcagccgagatagcagcatggtttcggaaagggtgtctttcaacgctgcagccgatgtttgagagatcttctttatcgcatataaccgaccatcgagcttgttccgggctttgactacctgcccaaacccaccacggcctagctggcctgtctcgtcgaagtcttgatgatatcgtgagaaagccggcacgggtccaaaagagtctaaccgtggctgtctctgcatggacacagatcccgatgccctttctcgcatctttaacggcgcatccacgcggaaaaactccgacggttggagctggaaagcagtcggacgctttttgggatttgggcgaaagaattcacaaagcaaatcttgcaggggcggcgagagccccatagacaccatcaactgattggcggaggtgtacctgagaaggacatcctttccaaagcccatctgaagcagcacaattccaagatcccagacatcagtcttcatggagggagcagaaccttcttgtgtcagctctgggggtagccaaagtggtgatttcgacgccgcgaaagaggtttttctgctaagagagtcgggcaaggcttcttcgacgttggactgcagtttaacgatagtttcaccagaaggagtcctgaacaagaagactcggccacaatgaatgttgccatgcacaaagccgctgcggtggtagaactccagagcctcgagtaactgaatcatccagccgcggagcatgtcagcagctacggtgcccacaatatccaggagctcggaaagggaacccttgttggcatactcgaaaagcgcaaagacggtccaagaattatcagatgaatccaagtggtctattgggcggttgattttaaagcccacaaattcaacaagattgggatgtcgcaatcgcttgattccctctaacttgtcctcactagtgcgcatctgctcacggaatgtcaatccttcggaattattctcaacgaggcaaagctccttcaacacaagcagcgggacgtagcatcggctctcagacacaacaggcctgacggtgaaagtctttctgcattgttcgctttgcagaagggtcttgccatagacggcgcggaagaccagcggctgctcatcggtgtcgttgacgaccaacggaggatcaaagcagatggcgccaggtgtattttccactaggtcatcaacataactcatatccacgccgccagatcgactctttcgtctcataagacgagccttgttccgctgtcgcatcttgtcttgaagcatttcctgcaatgcgcgctcttcctcgacagctgcagccttctgtttgcgaagtttctcttgtttttctaggtctgcgcgctgaagagcagccgcctcttgttccatgcgctcctcttcaaggctgggtaggtctttgtcctgtgcctgtgcctgggcaacatcctctagaacatcttggatggacaccgcaagctcgtaaatcatttcactgccgagcagagattttggcttgttgcgtagaatttcttgtatccgggagcgcgctccatcgcgaaagccgtcgaggtttcctggtgagaggttggggattgttttaggatacgtagtggggagttcgaccagcaaaatgaggagtacgtctggattcgaagaggagcgcaaatgaagcttgaatgtcacatcggaggattgctagagtgtatgggttagtgaccacgaggggcccaaacagctcaaagagacacccacctgccaggccgaccgcctattttctacttcttcaaagtcgtcgccatagattgagcgcagagcttccacctctgtctggtggatttctcggtaattggttgtaaatacgggggacgtcacggaggaatcagacgtttggtttttctggcgggagggcttcttcctctgtttgggagacatcgcggggcgtggcgagagctcgccctacaagcgaccctgagcgtcgtgcgacatgagggctagtaataaaagatgaaagggttatgggaggttgaaagaaatcgggcagtcttttttccctcgcctcttgaggctagaccaaacaggcggtcagataatacgcccttccacttctggggtggagatgcttagtataaatgacgacccagttggtttaactgtggatttatgggtttaccgcttgtattctactgtggtttaatttcgtctcatgcttcttgcgtcttgtgtttatttcaagtcgtttacgagatagcccatgtgtctatcgacttgtctatcatcgccgtcaagccaaatcaccagtccctgcccaatagtgggcccagatatcttgagataatgagctggtgagccggtgagctggcatactgagaagggtggcaattatcgaccctgcagtcgatcatctctactagtgttgtctttgttcctgtgactatccacaatcgaagacatcgagcaacaagctgctagccacagcaatcattggtgcgtatccgcaatgattccactatccttggccctaggtccaacacacagacccatctgcaaatgcgacgctgctagcggcaatcaggatccagcccaggttgagggcgccgaaatacgaagccacatatatggcagccccatgaagatgtctcggactccatagattgacattagactgtcgggcctctgcttgtccaccactctgtacagagttaggtggccggaactggaagaaagtgagagcatgttctggacgtaggatggcgttgacaccgaatccgacaaatgtggttgcaattgcgcgggcaatcaagcggagaacaaccaaacgggaaagaaagatattgtcatgccaagccagtcttatgtctgacgtttgcgtagtgtctgcagtggcttgcagctttcaaggacttgagcgccgtaagggatcacagtgtagtcttcgaagtcatgggaaagacaagaattcgggggatttcttatataagacctgaagatagcatagatatttgtaagatgctctgagaacaatcagaccccgaagaggaagaattgatctaagcaaggctggtacatagttgtagactccagatatgccaagtaccccaggagggtacatatggatgtccactcctctgtacacgcacatgtgtactctgtacacacctgttatgaacaactcaaggcccacaagcgaattcttctcggaataaatgtggaacaaaagaaggtgaagaacttctcccaaatcccaatcctcaaaagtccaaaaccgagtgccaagcgtaaacaaaaggaacacgagcttatcgataagctttttccgaccgcgccgaccataaacatccattagactttcgattgggcttgaacttcgaggtttcttccaatcccggcagtcaaaatgctggactggatcaaggggaacgatcaaagcacacaggctacaggtgtggtgattacgttgacctttgaagccattgctctaacgtgatgctacagatgactctaagctgctagaaccccctgagactccaggccatgtctttgccattcgtgcgttcaagagtgctctgtttggcacccccggagcagaggacgatggaaaaaacgcgtccccgagacagtccggtcaccaacgaagcaaaagcgatacgacaacatccgcgccaactgagatcaagaccgacgcgaaatcaggcgacgcgacttacaaccccacgggatccccgacgaaaagcatacttgttacacccggaaccgcgttgcgtcgtaagacggtatcctttggcgaaagtgtcatcgacaatgaggggaaacgccccggctcggccagtaagccggccaagactccaccaaatccttccggagccctcagtacccagtggatgtctgggtcatcagatggaaacggcaagccgaggagcaaactcacccagacactcatgaatgcacgcgacaacgcatccaagaactccgatccggccaagtctgatgagaacacacgggaaacgaaacatgccgtgggctctggctccaaggatacgctcgatgaagatgtcactatcaatctggatgacccccactcagagtcaggcaagtactggaaaaccgaattcgataattatcgtgtgaaaaccaatcgagagattaagaaattgattcattaccgatcgattgccaaatcctacgctcgcaaaaaggatacagaagctatgcggctggccgacaagctcaaggaggaagaagaaaaggtcgccgagatggaaaggcaggtgtcacggcttgcttcttcgatggtcggggagggatcgacaggcgacaaggagcaactagttcaagatttgaccaaacaaaccgctcttgcattgcaatataagcagcaggttacctcgttgcgcagtgccttggaacgacatgatgttgtaagcgatgcggcaaatatcacacaaaagaaaaaggaagaacctccttcaaacaccccaactgaggagcttcgcaaaacacaacaagaattggaacaagccaatgccaagattgaggagatgaaaaaacaacagtccgaactaagcaaacttcaagacctcgcgcagagctcagaaaagaaagcccaagcactcgagaaagagaatgacactctgaaacaaacactggcgcgagtgaagcaggaaatgtctcgatatgaaggtcgacgaaaggacaaggaaacaagactgaagcagagagaagccagactggagcagcggatccaagaatatagagagaagctcaaaacagtctctcaggagcaccgtgcctcggaagagaatttgaggaatacttccgaagcagaacgccgtcacatgcagaaacagatcgaccttctgaagctgcgactcggttctaccgaacgcttcccggcactaccttccacagagcggcaattcctaagtcctcgcaaagacaacacagacgtgcaggcgtttgactttgactttggcgaccaggacattactgatcaggaccttgagaaacctgaagaagaacccaccgaagataccgagcctcccccaagcccgagtccacgctccaaaatacgcgaatcgcgacctgctctgcgcagtaacacactgggcacacttagtacaagaccgaatacccgagacatagtcgcagatgacgacgaggtgacacattatctgaacgaaatactcctgaagccgcaactcgaggcccgtactgcagcgttggatcaaatccccccgtcctcgcctcccgatatctcagccctgaagtcgttgaaccgcacgtactcaagacgccgactcggcgaaggccagcggctctatcggaatccgaacctgaacctgaacccccctgctgacgatgatactcggctcagcaaccgacacacacaacgcgaacgtacccacatcaaatcgaccctcgattcaatctctggtctcccgtctcgcagtcggtattcggggtatgccgtttcagcgggcgagcgcgtgggcaagcggtacgggtttactgatgtccagcgtgaagcgctcactcctgaacgaattgccgcggccaagtcacggctcaggcagaaggacagtcgtaagatcaaagcatttggaaaggagaatctttgaggtgactatgtactatggagtcgcctgatttggaaataaggcatagcttagcattatggggtggtgttcgggttcataagcgttactgtttttcgtcaccttgtttctatctacgttttcagcgaagacaattgttgtattattgaatcggtggctcttctagtctctcgatcgggatcgctcgcaggcactgttgccaaattctcgctgcctccgggattggtacaatggctaatgtatcatatcacacctttattcaaaatctagattaggtattatcttgtctacatccagctgtgctctttcactatctagttcacctacaaaggttccatatcgtatattcacccagtgtgcaacggaaagaacacggtcggtcgtgtagtgcgctctcaggccttaccgtcagagagcgacacgacggcccatttcccgccccaggcccacttacgagactcagcgccgccgcctcccggcagtgcgcggagcttctcgtcctcgccagcggggagaccgacaacgggatcagccttgcaagtgcggaaggctagaacacggatccccgacttagggccaagcgggccgatagcttctgtgaaaggagtggtgggatcccattgggcctggatattgttagcaagaaacacaaagcgaaagaaagaaagcaaagaacactggacttacatcattgaccaactttcggtagttcaggtcgcccttgaacaagacaagctcgctttccttcagatcttcgaacagctccggtgccacgaatggcatgcgccagtaaccaccctgggtggtccagaaagcgtgcggacgcaggatcagcttaccatcctggtggaactggctccactgctcgaagaggaatcgcacgtcggagacctccttgtcagaaagaggggggaatgtcttgcccgagccatcgatcgctgtgtaaaaggcctgcgggtcgaccatgcagttgagcagatcggagaaatccttcggggtgacgtctgacacaaaccatggcaggcgcttggggtggagcacgacactggtcgccagtccggcggacagcaagtatccagcgagaatgagatcaacgaataactcaaatccggagttatctaagacgatgtcaacgcggcggtcgccgtccttcttctctctccgcgccttttgcattaccccgaaagcagcatcaaggtcattgacaatgatgttctgctctgatgctttgcgcgcctcagacccctgcagtttctggatatcctcgtaggtgagagatgtcagaagtgacagatcggtggcattgccccataagcagatctcgcacatctccgagaagagcagcttctcggccgagtcgatttcctctggcgacttgttctctcttgcttttccagactcggattctgtcgccaactcacggtatctcgcagcgagttctagtacggcgggccgggacgacttgaatgtatccatcttctggcgggcgaacacgtcatagcccttccaatgcttagacaacgcgaaaagggcctccatgcggcggtctatgatggtcgttggtcagtattgccgaaatatatctattctctgttggaccggggttgggcttacagaggtaacactctgcataaagccaggccacatcgtgccagtgggggtttccacgctcctccagctccttgttatacgaagcgatatctggatgtccgtcgtcatccaggggactagccgcaatagacacgttaggtgaagctcttatatttctagcattgaggataaaatgactcacgtgagttgtcggtcgtgctgaagctcatacttcaaggaggccaatttggcgataatgcccttgccttcatttgccttcccgccgtccttgacagctacaacggtgcgatgaaggtcatcgatagcgccagtctagagtcgtcacacatattcagcaattgatccggttatcgattgtctgccaagctcacgatgatgacaggccaccgctcgttggccgagaccgaggcaaagctcgacttgtcggaggtgaggtactgagctgctcgggttagtctaatatatttatggccgaccaaggatacttacgagtcttaggatcgaattccatgactgctatgcaagatgtatctagaccgagggcaaaaagtcaaagtggcagaatcgaggggagggcgcggggtaaaagcggtgtacaatatacagttggcgacgtcagagctactcggagctactggaatacatcattgcgcataaatacattgggaacatcaattctaggtagatctcgtaggcaacgccgcgcttgaaaatcagatatgccatcacattcccgaaagaatagagttattcgcgtacgcctaagacagttagctggggaacttgattagatgtttaggtcatggtcttaccatcggcttgatatcggggtgtggcgatgccccaaagacttcatatgcaagtttgagttcagggccgatgttgatgtaagcgcccttattttcagtcgcgtcgcagtatctgggagcggagaagacggtgatgcaacgaccatcgtgttcaacgtcgtaaccgcccatccgcacctcgtgggagcgaatgatagcctccaggccattgttttcacagaagcgcttggtcacatcagggccaaattgaagaccgacgccacgcttgctggggccgcggccaacctcgggctgcgggtcggtccagagcatctccatcatcaggcccgcttggccaggctgtcgttggttatggcggttgagcttgcggatatcatctaacttgatcttgtcgtcggagaagagaccgccgtgcaggacaaggtacttctcgccgatcaaagtggccagcggcagagccgagaatgactcggagaataccttgaagacccgctcgttatatttagccttgcactcgccttcgaagccgtagaccttattcatatcatccgtctcgtggtttccacggttaaggaagagaccgttaggacgcaaccacttgtatgcataaagcagcagagcgacttcgcaggaccaggagccacggtcaacaaagtcaccgttgaagaggtaggcgtgggtatcggagggggcaccatttagtcggaagatattgagcaaatcgaagaattggcctaaacaatcagcaactgcttcactcaccagcaagacaatacataccgtgtgtatcaccgcagactgtcaacttcttgcccgattccaccccaatttcgaccatcgtaggctcgttgtatacgatatccttgacagccttgatgatctggaagacatatttgcgatgaatattctttccgtccttaaagcgctggaccatatcatcgaggaactcctgcgtcatttcctcgccaaggcgcacaccatcataaccgtcctcaacattgatagcatcgatatccaaatccgcaaaagccgaaggcggatctgagatctcaatggcccgctcaaactctctgcggcgcacgagcttctcacactcagcagccttcagcttagcattctggttggccggttcgcgtctcaccacagccttgaaatccttcaaggcctccttgtaacttagaatggcggtattggcgagagcacgtctccagtaggcctgtggtaaatttggatttagcatatatcgccgcgaccgctcaatatgcaggcacaagttgtctctcttgccggctaagaatgccgactaaccttcacatagttgggatccaattcgattgccttggtggcgtcggcgatagcaaaaccgaaggcttcgagcttaatctgagcctataacagcaagaagaaaagacattagctatgccgatcctaacgagtgtgcacgcgactctcgggaatagatcgtcaggaacatacctgggcccggttggagaagaaagaaggatccttgtcgaatttggcaatagcctgggtataaaagtcgacagcgacaggccagtcatgctcagcaaaggccttgttgccctgcaccttaagcgcagtggccaattcttgatcggtagccatttggggcggagataaaaagcgaggggcacgagacaaggattatcggtgcgaaacaagggcgcggaggaaagaaggcaacgattatacgagccggaagagaaagaaagagaagccagaaataaataaaactcctctaaatccagtatagactaagagaaaaacgaaaaaaagacgagagagtggtcaaaaggaaaaaataaaaaagtgagagaagagaggagaggcttgttcctgcttctgcaatgttcttttttccccgatcgcaacgggccttggcatcgatccagacttgacggccacctcccatccatagctttctctctctcctcacaccctcagatctcctccatatgtctttctacgcccctccaaaccagcagcgcacgctgcgcgcatgcatggtctgctctgtcgttcaagtccacaatgtaagagctacacgatctccgttccgcgggcaactctaacgacccccggttcctctagaaattcatgcgtgaaggctgcccgaattgcgagagcaccctccaactccgggggaacaatgatgctatccaagaatgcacgtcgcaggtcttcgagggcctgattgctgtgagggatccggctgcgagctgggttgctcgttggcagcggttggataactacgtgccgggcacatatgcgaccaaggttacggggacagtaagtgcattctttgaattcctaagctctgttattcctcttatcaagcacgggttggctaattgtgtctttcgcgttgacagcttcccgaatacattatcaacagtctagaggactctggtattaaatatgtcccgtacgtgttcgaaatcattccactatctgagataccgtcgtcgtgatactaacggtcgcttgttccagtcgagacggaagcactggcgaagaagatgcatgaagcacctactctcaagtctttaacgctacacgaacccacccttgtccatacagtcttggtttcggataccctagcgcacacccattgattcaatcaagacatgctatatgagggtggtttcgacaattttgctggtcgttcggagtttcggggaagcattaccttctttcttcatatttattggactgcaagggcgtacacagcagattcagattacttaggagtttacaattccagtttctttagctgggggcataagataagaaaacggcttgcagagtatatatccctactctggccaatgattcggttgagtcataactcaatggtggacaagcacaatttccaggaatatacgttgcatttttgtaatgacatgaaagtcgtggcagcaagggaaaaaagtgaaccctgcaggacataaaagaaaacagaaaaaaacgctcattaagccaaattgaaaacgcccggacacttctaaaggtcattgccggcatttgtttagatgttctggacgatctgctcgatcttctcaaggaggatatcggctgtagtaaacatattagtaaagagctcttaagcacaagaaagaaggttaacataccgtggtgcttctggaagaccagcatgggacgcagacggatagcagagggaccacagccaccgacgttgacaccgaaggacttggccttggcagtgaactggtcgcgcttgggggtgtcccaggcgatgaaggtaccgtggtccttaccacggaggttctggaagtgctcggggtacttctgggccagaccggcgagaccggcgtagaggtagtcaccggtggtgcgggtgttctcgacgaggtcgagacgctcgatctcctggatgattccgcggaagatcagggcgcgggctgggtcgcccatccaggtgttgaattggcggtagggcttgttggggcgcagggcggggttgccgtagtagtagccggcggtctgggccttcttggagaaggtgaccatgtccgggggagaggtcaggttccagtggtcgtgggcccagaacttaccggtggcaccgacaccggtctgcacctcgtcgacgatgaagaggacgttggtgcgcttggtgatgtcgcggagaccctggaagaaggcgggcgaggcgtggttgtcaccaccctcggactggatgggctcgaccacgacggcggcgacggggttgtggaactccttgatgagacgctcgacctcggccaagcagcgctgctcctcggcggtgttctcctggacgtgctcctccagagggtacttcagctgggggaagggggcctggggccagtcaaaggcggggatgtcaagcttgtggatgggcttgctgcgggtggtggacagggagccgaagagacggccgtggaaggcagacttgaaggagagaatggacaggtggggagaaccagggctctggttgttcatggtggagagcagctcatcgttggagaagtcggcgccgacgccaccacgctgcatctggcggtagtacatgaaggcggccttgtaggcagtctcgttggcatcggaaccagccatggcggtgaagacctggttcaggcccttgggggcagcacggaggactccggtcttgagaatctcagcccagtcggaggaggggaagttacccagagcagggcggttaatcaaagcgcaggccatctcgggcgaggcggccacctgcttgaggtgggggttgttgtatccaacgggaatagaagcaatctgagcatacctactggggtcagttcctgtattccaattggctcgtggctagtgacttacacatcaaggagcttgtttccatcgagatcggcgatgctagaggcggggttagtcgagtcttgatagtgggttagggtctatcatactagttaccaacggactggtagtagtcggccaacatgttcaagctgcggacatcaaagacctcgtcgagctcggcggcggcggccttgttcttaggtccggggagtgaccccgagacggagggtgcggagggctcattggggaagaaaggcttctctgcacgcagactggcagtggtagagagagcgcgagctgccgggaggcgagctgcagagcgcagccgtgtgctggcacggaagaccgaggacattgtgaatgtgatgtgaagaggggtggtggggaggatagatgaagggtggagagagaatagcggtctagtaagctatccaatggagggaaaaggacccagatcaatcaatctactcgggcaagggcaagggaaggaggacggatgaaatagaatggaacagcaaccggcgcagggtggctttataccagatgcagttggagtatgctatcggtcttatcctggagctcagtagcttgtccccgcgtatgttgcttttttttcggtgatattgaccaatcgggtgcttgatctcgacaacgaaacgccgagcatccgatggggtatctggacgaattgagaaagtctacgctggtgggttcttgtcaaatctatatggtaagagtttccatataaacgtcccgaggggggctattgtgcatgtatttatctcaatggggacgagtcacgcacaacggcgaaagaaagaagtcgaggccgtcatgttgctactgtcgatcatcccagggttccgggcctctgcgataagctaatttgagtcttggcatctttttttagctgcgtgtatgagcatcgatgtatgatgtcttgactatatcatggttggcttcacaatttatagcacgtgtttaataatggattcgttgtttaattggtaacgcattggtcttgtttagaccgggacatccggtggatgtatccagacgatcctagtaaatatgcaatattaagttacacttgcatttatgtaaacgggaaatagaacagatgagccctaataagctgaacatcggcgaccttaggtcctttggctgataacgcactatttcacccaaaccaccaatcaactgggcttgtggtttagtggtataatactcccttagcatgggagtgtccggggttcgattccccgcgagtccagatctttttgttgccttgacaatgaggtcaattaggagtgcaataactagactatgtcgttggtgatatattttttgttttgggtgcgtcatggcttgacgtcacgctgagcatatatatcttttttccgtggttgggttttgtaggtaaattgtaggttgagacctatgtaaggactatatatatctttggcccgaaatggcaagaagacaacgccggaacctcattttaccccaacacctgggatagtctacagagacaattgatgccgttacatagtgaatccctcatacatagtaatatatatacaccacacatgagtacctacaacctagtcaacgaagaaaaccaagagcgcaccacgcgccgatcctgatccacccaatccagcaaagttcgaactagcgcaggactgtgctttcagcgcacggtcaaaccttgggtcgagggtgatcattgcttggaaaacgtgtagatctacaccgagtatctatactactataggaagcaattattgggctggttaagtaatcattagaatcatgatagtatcaaatagatgtagtacaagtaatatcgttatttgtgtgaagtaccccttctagcacaataaaatcatctaggctaaagtgacataaattttgatacaaaaaaagaaaagaaggaaggcgatgtactaaaacagcagttaacgcagctgccgaccatcgaatgtctcgctccgtcctgacgcagaggaggaggcagcactcgtcggagaggcatagaccatgccgctcttcatctcaatgctatccgcaggggtgacggcgcggccggtatcggatgtgatatcataaccgtggcccatcttctcgtggctcgggagtcgggactcaacccagctctccatctcgacggtgcggatgatttcgaatcggtcgctgctgtaactgggttggtggtggccgtcggcgacgagacgggatgctcgggagcgggcggttgagtaccagtgtctgtgcgtgcgagaccgctggttgtaggaggtggtgttgtggttggagctgaggaggcgggggaggaaggctgcaatgagggggcggagtgctggggctgaagagcagatctggtgattgttagcgttgagtatgagcatgggtagcgcgactttggtcttaccaatcccaggctgatttctactgccgcggcgatcagcactggccatccaagccaggtcgcgtcgtagccagtcaccatactcttccacacgtatacggttcgcacggagccggctacgttaactatggagccgagggcgaagatggagataacggcgagtcgttggcgagcagggagtttcagactccagatcaacggcattggtaaagccgtgactaggaaatcggtgaagatgttgataacactggcggagaaaacaatcgcgccgtcattcatgcaatggtatgactcggtagggttaagttgccagtatgcgcggataggtctgtatgaaacattagcaacgattctcgatcaccacgacagcagacgacgcacgagcattggaagatactgataatagtgaacagcaaactcgccacgccaacaaagacaatggcgaaaataaacgccaagttatacagcgcaaagtggcccttcccgatgagtcgtcgacagaaccacaacagagagatcttggtgaagcacgacgacatcgagaacatgatttggaaggagagatttagtttctgaatagcttcgagctccagcaatttaatatcccagatatggcggttcatgtcccaatgttccgtggcgatagaagtgacgatggccattgcgatcccgaagaccagaccgatgacaatgagtgcatcatcgatgccggcgctgcatgtgatccataccctggtgtatagacggagggagacgaccagggaggccagggtgagacagacgacgttcacgatgaggacgccgtggccgcgcgtgggcgggtcgatatagtttggggtgggccatgagtccaggatggcagctggagggagcttcataatcgtatcggtgcaaggaagacgaagaataaaagattgggacaacaaactgcagcagaagatagataggtaacgaacgtgtctagacagatgccattgccataacccaagcccgcgatgaatgggaatgtcgatcaaaaagaaagagagtcagagcagaccgagggtacaagtgagccagctccgggtaaattgcgtctgttgaggaaaaataaagaaaaggtataccccaccgggggggacatggacatggggtactagaccgcagatataatacagggctaggccagacctttcgtccaatacagagctatacaccaagcgaccagagagacacacccacgaggcatagagtttaccccaagaacacaccatctcaaaaaggcgtcagtgctgaagcatcagggctatgttgtacatctccgtcgccaaaaagccgttccacgccatgtccaaaatggcaacacggccgaaggttgagtggaatggacaatgatagcagatccaatgtccccatagttccatcgtcggccccactgagcctttggatctggatctgaggcttgtgagaggttgagatggtgaggtggcatcgcgtgtgagagagacccctggctcgcttcacggaagaccacggactcccaaggctgtcgacttcgcttaaataatatattctggctctcacgtcaaatcacagtgcaatagggggaaagttaattgcattggctcgtaacaaagtgttaaaatctgcccctacggaggccgatgcgtggtggtccctgctccggaggggccgatgggttgtatgtaactcgttatatgaggtaggaggttcgttataatttagacaattgaatagatcataaccaaagaatatcaagtagaataagagggtagtatataactagatgtaactttactacttcacaactgtaacgttcagctcatcttatgatgcggggtcactcttccaaggttgtctccactctgacaatgcatctctcacgtaatatatctggcacgtgtaaaacaatgggctgagacaacgcctttgcccgctattttctgcacgctttaccgtctatgatttacaggaaaacaatcaatgactcttacatatcattcctactatatgggtatcattcaaacaaaaagagaaaagacaaaaaaatacaaacaaagacaaaacctcacgatcccatggacgcaagtcgaagtttcaattgattctcgaccaatctctgttcttcaagcgtcaatctgtcctcggggtcgatttcatcgacacaaagtttgatcttgaggatggactcggcgcattcagccttcagtctccccatcatctcgggatcggtcgcgaacgcagtttcatcaatcccgcctttgtggagactctcttcccagggaaccagataccgttctaaggccttagagcccatgcgagcaacgtgctcatcatcgagaagccggccggcaagctgactcttgaaaatcgtcttgttgtagatcttctcctcaacggtgccaccagccaccattcggtacacaaaaactttcttcttctgaccaatgcggtaggcgcgtccgattgcctgctgttcccaggtagggttgaactggaaatcgaaaatgacaacgcggttcgcggcctggatgttcaagccaacgccaccggatttggtggagatgagaaagacgtaggtcgagggatcgttgttgaagctccgaactacctcgggacgcttcgctggagatatattgccgtggaggagagaatacttgatctgtgttctgtccattatttcccccagatacttcagtgttggaatactggaagaaaagactaggatcttgtccccgacagagattgcctgcttgactatctcattgaggatcatcactcggctggataggctcggttctagcaagttaggagcctccttgaacacatcatccagctcagataacattgacctgggaatgatttgctcttcgacaggaatggtagatgcgagattagatgcgaggttaggccccggattaggtgcgagattaggcccgagattattacccgggtcatcaccgctaggacttttctgtttaccggatgcatatttggtcttccgggattccaattccgccttgaaaagggccgggtgattacaacaaagcttgagaagaggcagccaagacataagctccgagcggacacccgcttcattcctcagtgctacacctttgataaagatgttgtacacagctttttgaatgctggtcggctcgaagtaaacagagaattcgaactttggcggcaggtcatttatcagtgaggacatgtccgctcgctgtaccttggggttgatgatgcgaaggaacagctcctggcgctggagtgcctctcttcggtcaaacttgctactttcaatctgcgagccattttcgatgggcttgatgaattgatcattgaaatcagcaaagtctcccaggtactgaggggcaacccaatcaaccatccaatagtaatcttccaaaccgttggatatcggagtgccagtgagcgcaatccgtttccgagtgcgcaagcgggaggttgcctcggcaagctggctttcatggttgcgtaaattctgagcttcgtcgaccacaacgagagttgggctgttcaacacccagtttctgacatttttgttgaccgatggttgtccctgctcctcgttcatttctgcattgtcctccttcacgagaatgcggaagatgttatagctgagaatcagtataccaccctcctcattccacgcgcgaatctcttcgttccggtcaaggagctggttttttgtcggaatggctcgaatcttgccaagatggtggttctcgggggaccacattgcaaactcatcgcaccaattttggattagcgatgctgggcacagtagcagggttttggattgtcgcaattctctaggaatttggtcacgaatggccgggaattgtgatgccccggcagcggaaattgtgacaagaagggatatactaggcaaaaagggttaactgggtcccaatgaatgggacaatatcgcatcgcaatcatcactcacacttgcatcgtcttgcctaaccccatagtgtgggctagcaaacacccttcttgtcttttgttctcaataacctctcggaacataaactgaattccagagagctggtaggatttgacatattgcgcgatataggggtccaggcatatcatgggaagtcggaacgaaaccggccttggaatattttccttagaagcattcccttgggcaaaccgagacgcaagcactcttttagcctcggcttgtttgtctatccgttcttggccttctttctgggcccgagacaaagtgattttggggttggccaatttccgcttgccgttgcgccgaatggatgggttcatttcgtcgggttggacatgagaggacacgtccatccatcttctgcatctccagagaagatcgttcaaacacccaaagaattgcgcgaattggtcttcatcgctgtcctctccgaccgccataagcgtagccttgacttcttttactgtaaaggcgccacaggggacttggataacgttgacccacgacacaaacaaggcggccattaacattgcagaatggctctcctcggcatccattccctcgatcaccgatgaatcgtcaaacatgtgttttagtgcatctcgcatatgttctcgatatacacagagcatgtaagacctgagatatttagaaagttggttgaaccgattcttcggcagacctatgagtgctttcgctacaagatgacgtcggtttccactttcttcgatagctgcccacagcataggcgagacatcgtcaaaaatactcacagcgtcgtcagtttcactgccgttgtcactgccgttgtcactcgtcaagtccacgaacctagtgttgaggcgcttcgggatgataggaaaagtttgtgcatctacctgaccctccgctttaccctcattcgagggcaaagttgtcatcggtatcagtggtgaagctggactatatctgtggacgctatctgtcttcaggcggcgcctcttggcgaccgggggctcgtaattctcttctttgtagaaaagatggctgagatcctcgtctgaagaggagtcacggaacggtccatctcgataagctgtgcgataacgtggctcttcgtgatccggtgcagcctcgttctgttcgagatcggaaacaagggcgtcttccgattgctctgatccgccttccgattctgatctatcttccgattgttctgatgattcatcttccatctcatcaccagtgtcgtgcacgaaatccgactctgaactgagagtttcttccccgtccaaatttacattgggcttttctggccgcggggtgcgtggcggacgagcaacttttggcggcgggctagtttgctccagaacggatagcttccattgatccaagaaaatatcgatcacagtgggatcgaggcatgcacatgcttgaagtaaggacgagcgggatgaatgttgcgcctctgcgagtgctttgcggagggcttgagaacgtttctccaggtgggcgagccgtgtcgagatttgacttttcatgcccgggagcctttggcccctggtccagatttgaaatgctttcggcagctctttcggcaaccgaatgtcgatgaactggctcttccgtgtatcaatgtattcatcgacgattttattaaactcagtatcttccaggttcccagaagtatccggagaggattgctcctcatcctcttccatttcctcgcgagtctctgtatcatattcggcctcggagctagaatctccaagaagtgggaggatatccgaatcgtttggggggtaagtcttagcaagataatcaagaaagtccttgtgcccaaacccggagttcggagcaggttcattgggagtgagggtgtccgggagagaaggtgtgggtgggcgttcgatgacggtggtctccatccggcgaggtttctttttcgctgtttggggtagtgagagaccatcaaggacaggagcggagctgatgagatcatcagagagggtaaggtcgatgtgatcattaataaggggggtggtattcacgggatcatcgaggccttttggagaaagttgtccattggggaatgctttaggaggaggctgcggttgctccaactgataaaactttggcgatcgtgcctgtagccatttactggctctcagaatatactggcactgcgagataattcttatgccaaggtctctcacctgccattctgtgatatagagcaaagctgagccggtgactagatgttctcggagggaattctcgagagccataagatctgggcaagccagattataagaccaatccccggccctttcatgacaaaagaatgtaacaacctcatccaccgtccagtggaaagggtctttggtcaaagtcatgtttgctttagggggggcctgtactagatcagcgggctgcggtccagacgaaccagtgcatttgtcccaatgacgcgacttgacaagggtcaagtttggaaagatccatcacttaccattttaaggcccccaatgcaaattaaaaatgaagtcagtgcaaaccgaaggatgtaaaagccgacaatgaagcattgagctgatgatatgtcaaagcgaagtgaacgaggagctttcaaagaaagagagccgggtatacgataggggagaagagaagagaagagaagaaagaaagaaaacaaaacaaagcgaaggaatatcaatcaaaagaaaacacgccaccctctttcttcccaatctctgttacgcgcgaagctctttttttgtgccggtgtttgaataggcggtgagacattttaagggcaattattccgaaaaaggaaggcgggggactcgggcggtcgagtctagatttctgcctcaggtgtcggccaaatgccccgccaattacaaatccccaagaaccttgggggagcctcggcgaggttggaatctttgaacaatctacgcaacttgagaaggtcgtggagtgccggagtaaatcaattcctattcactagcaatatggcagaatcaatttattcaaactatccgccagatctgtctccagctcaacaaaagtttcttgtcacatctgtgaaagactgggctattcaaaatggtctcgctgttcgaccatccccagcaattgtcccagctggcctagatccaaatggggtgctggctacaaatgcaccggtgacattgtttcccagtccgtttcctcggacttgcttcgaggaagccactgctctccaagagatctacaacaaactttatgctacgatcacatgcaatgaagaatggctgggaaagattgtggaagagtaaggatatttctgctctagtatggtagatgttcattattgaccattttcaggctcattgaagttgatgactttgttttgaacttgtggaaggttcatcaggatgtgaagaaggaaggatatgttcaagacctgtcactgggcctcttccggtccgattacatggcccatgttctgcctacaggtgccacggctctaaagcaggttgaatttaacacgatctcgtcatcgtttggagggctttcagctcttgtgcgaaaaatgcacaccgagcttctttcctcgccgccgggttcctcaatcaactatccaccccaccctctgctacaatccgaggttccaccggagaacaccgcagtggaaaccctctcagcaggtttggcggcagcccacgaggcctacggggtgtccaagtccaccccggccctacctctttgtgttctctttatagtccaggagtcagagcggaacgtttttgatcagcatgcactctcaacacagctcaagaaagttcacaacatcccagtcttccgtgtggctagcgtcgatatcttggatcagacatccattcccagctccaactccgcacgaccattgttataccagcctcctcactcacccgactcaaccttcgaggtaacaactgtttatcttcgaggttactatgcaccagacgagtacaaatccaaccgtgactggctggcccgaactcacctggagcgctcggcggcgatcaagtgcccttccgtgctcaatcagctgtctggctgcaagaaagttcagcaggtcttagcagagccgaaagggccagatcatctcgcaagcttcttgaagggggttgacactacgctcattgaaagagttcgagatacctttgctccgcaatatgacctgtcagttgacagccagggccgcgatctagccctcaacccagataccgccatgaaccatgtgctcaaaccacagcgtgaagggggtggcaacaatatctacaaatccgatattccaacctttttgcgatctattccggaatctgattggagaggctgggtacttatggaactcatcaaccctgcagccaatgcccaaaatgttgctctacggaatgacggcgaggtccttcgaggacatgtcatctctgagcttggtatttatggtaccattctttgggaaagtactgggaagattttgcacaatcaacaaggcgggtatctgttgaggaccaaggggaaggaggtgaatgagggtggcgtagccgcaggattctccagcttggacagtgctattttgttctagataacttagactagatctgacatttacaatatcaacggttcattcatacttcagctttctggcatttcgtgtaagataatatctacgacagcatgagtctcataacgtcattctggagcagatgcacagcttctaaatcgcgtagaagggagaaaaagtatatatggagggctaaatgccgagacaactctatgcaaagatgggtaaacccacacaaagcaatatgagagattcttctttggccatatttccctgcagcaatcaattctacaatttcgaccgacaggcctcaagaccagatggtccatcgtagatctgtttctctaccagtcgagtgtttatctggacaacatattggttagttcacgtgtagatcaagaccccaaactgagaagccggggtacgtacgtgctgtttcccgagttcattaacattctgcacgccgagaagtcgcatacatgtcttggtctcctcagtcaagactaagatctgtcagtaagtcactctacaaaaaaaaaacgccgagtttcgctgatcatactttccagtgttcttctgacgccgtccggccccccggccgccaaaccccaaagcggagctcttcctagcccaacaccatgagcacccaaacaaagagccttgaccacatcagttcctctccggatcccgccatcgacccacacttcgatcttgtcgaagacctcggggcagtatttccagatttcgagtagggtgtggacagcaggaggagccgtgtcaagagaccgaccaccgtggtttgaaaggataattcctttgacctggggcgtatgttgcgtggcaatatacgcgtcttcgtgtgtctgaatgcccttgagaacaaccggaagatcagtgtgctttgccaaccagccgagggtctctctccatgtaagcgaagggtccattcccttgaatacggggtctccagactgggtgggtggcgcgccctcattgttgtcaccctggaatggagcctcggaagcgatgacgtttccgctgcgctcgtcgtcctctcttttcccagtcacgggggaatccagtgtcagggtcacgaatttgattgcactcaacttgttgattcgagccagcatacgttcgctcttggttcggtcgttctgcacatacagttgccagccaaagacttggcccggggcggcgcctgcgacgatctgctcgggcgtcatcgacgcgctgttggaaatgatctgcattgcaccgaagctgcgacatgcttctgcgattcctgcttcaccagtggggtgccctaggcgggccatagccgctggggaaacataaattgggagagacacgggatttcctagcaattttgtcttcaagtcgcattgtgtacagtcgatgaagacctttggccgcaattggatggagcggtagacttcgttgtttttgcgcttgctgatcttgtcgtcggatgccgaataataataggcccatgcctttttattcactattttcgtggcggcatcttcgatctcatccagattgagcaacgtttcgagcgcctttcgttccattttccctatgccgtctgatcccacaaagtaggaaaagggaaaagccgaggcgggaaaaacaggggtgcatacgcgccggatactttttcctttctgggattagtgccgtcgccaacggagaattaatatgcgaaggaacgacatgcgagggatgggaagtactacaaagtactatcaagtaagaaatatggaacaatatacaatacaaccgtgggctataggccttttgaacaagtagaatcaataaaccaccgattttagctctaggtaaccttctggccgagacaccggaacacttggcatttgttatgacgatgaatagtacccctgtttcaaattttaactttgtattctttttcgttggtatcattttgtatgtttttctatagtatgcattgtctactgtctacgcctgtctacaggcttgacgtacaattaagcgcttgaatgcatactccataatctgcagcacgagccctaagcccactcatgatctggacgattcgcgaccaaatcccctcttattccccatgaaatctgcttagaccaatagaaacacaatacaaaattctcctggagggctaaaattaaacatgcggacgtgtccgtcgactccaccatagtctagattcccgttgaaacgctgctgtcaagcgaataggttgcccgtgtttcattttgacttccccttcttttttcttccttttcttcgtgttgaggcttctagaagaccttctcttcccatattcgacattcgtttatgtatttcctttcttctaatatttgttgagatcattactgtctttccttgcttctagtcaaatctattgaaatcagaactgcccagttccgacttcatccaccttcgtttttttttttttttcgttttttccctttctttctggttttcttcatttcaccatggccgaaggccacagtgcccctgcagctgaggcgccggcgccagcagcagcagtagcagcagactgtactgctgcaccagtcgccgcagatatgcgctcacacgcccatcatcaaacggcaccgatccatgagcaggagcaggtctcctttggacccttgactcatcggccaacattcttggaacacctggctacctcgcgagacatgcaattcaagcttgatcgacgggatacaagcgagttggaccggtactttgtaagtcatggctgcgagatgatctatataaaacacgaacagaagactaggaaggatcatagacaggcaggctaacatactcttgacctagcatggcccccgaaacatggaaaagcattccaagtggccgataatgttgcgattgcacggcagtgtcatgccaaaaatgatcatgccgcttgtaactatcgctctctggtcgaccgctgttactgtcttttcgaagctggtccatgaccgtgagtaatccccaagtgatagatcaaagaacattctgagttatatactgacgcgaacaagtcggtatcaacaacatcctgctcaccgtgctaggtttcgtggtaggtttggcgttgtcattccgcagctcaactgcatatgagaggtatactattccctggtttttagcttcaactcgagctatacactaaccgcttgcactgcagatgggcagacgggcgcaaatattgggcccagctcattcaaacgtctcgcaacctctcgcgtacaatttggatcaataccggcgagagagaaggcgaagcaggaaaagatgacatcttgagaaaactgtacgtgatacctctggagtttatcctggtatcgattctaacaagctgtctatagctccgcgatgaacctcattctggccttcgccgtctcccttaaacacaagctccgcttcgaacccgatatcgcatacgaggatctggctggcctggttggacaccttgatacctttgcccgtgatgcccacgaccgcatggttgtcaaccctccgcctaaatccacttggaagtccgcaggagagtaccttggcatgtccttcgccgagtcaaaccctcgcaagtatgtcaaacggtcgaagaagcctctcggacatttgcccctggagatcctcaaccatttgtccgcgtatatggattcatgtgtagtcaacggtactctggtttcgactctgcaccaaggacaagctagtaagtgtctaaccccctatcttgtgtgctccaactctaaccgaacaaaagtcgccatggtggccaccttgaatgagatcttgaccggcacagaacgtgtactggacacccccttgcccaccgcatacagcattgccattgcccagatctcatggatctacatcctggtacttccattccagctctacaatgccttagaatggatgaccattccagcatcgattggtaagaacaacagaatcctcccccctacacaagtccaaaagaaattctaacagaccccgaagtggctgcctatatcatcctcggcttagccacgatcggcagcgaaatcgagaaccccttcggtcaggatgtgaacgatctcccgctggacacctactgccgacagatcgccctggaaatggatatcatgactgctgtgccccgaccaaatgtcgacgacttcatgtcgcgtgctgaaaacctcgttctattccctcttagccagttaggataccctgaatggaaagagcggagcgtcgacgatattcgcagcgcacttagagctaagatggtcgccagcccgtcgtcttcgtcgtctgctgcatctacaatttcggaaagcattcgtcccaagactactgggtcatcagtctgatcttcatcttccttgaaaatctgtcaccaacaaccagggggaaatacaaccggtaatcttcctggcagggtgagaattaattgtgcattttaataagcggcatcaaattgtttgtgataattgacaaacgcgtgggtcatggcgttttcatttgagtcatgttgactccaaaaatcaaccacaaaaaaaaagggagttcattcttgtcttgcagttgcagttggttgcgtacatagattgacattgtctccaaaatttatttcctttgtcctcatcgcacgcgaactttccaaagtgctagtatgtatgtcttcagccgccgatgtaggccaattgtctgtgtctcattccttcccatggagctagacacaagcttagtctcaggtattcgattattgcccggctcgcggtagggaaccaagccaatctcgatccatttggagctggcattgccgtcgcatatatcgtgggcggttactgcagcagccctgcagccacacccatgcctagtcccacgtagtatgcacaacatcaggcgtgaattgcgagtaaattcggatgggcctcgccatagcccgagggcaatactttgacaaagagtcaaaatatatagactagtcatagttcaaaatcggttctcgtactcgctttgaagcaagagtacagccagcaagtctagggaacgaataaatcggccccagagccagcaaccagagcacctaggaagtttcccttggcgcaaactctccacgcaacatctccagagcttgccgaattatttccgccgccaatccatgagctcacggcgctcacgacggctgaggcatcctcgcgagggacgcgaatccacataatatggtacttcgtggttgatggagatccgtcctcgatctttaggatgtcgatcggaatggctgttcctgtcaggccgaggaattgcgacaatgcggaggagaggtaggttcgtgcggagagggcatcgaggggttgcggtgcacttcctggttgggagacactaaaattgcaatgttagctttatttctggcagaccaaaaaagccgacggatagcttacagcttgagcttgaggtatgtccagggtggattgcgcgacgtgaaatggataatttttggctttggctctggcgctttgcgcttcgcagcttccgttacagcgacatttgtgtcaatttccatgtcgccgtgtgtatcctctgtcatactggctagctttttgatctgttcggggtggtcggaggttgatgttcgcccggagctccgccaaaaaaaaaaaaatcacagtgacggcgtcacgggatcaaacaagaatcgaatagagacaaaaatatgagctagcaagtgggaatcaacaggctttaaattcgaaatttatactaggagtctcgcgtattgacagcgtcctttaatatttgtgtcgcacgctgcaagtaggcttcttcgccgtcgtctccgatctccaaatcggcaacacacaacgttttctctcttgatttcgcgccacgaataattccgacattcgactttggaacgttaaatatctaacaaatggtcagatggaaattgtgactgactttattccctagacaagacgggaagcaaggagacacattaatagcccacctctgcgaagacacgcgacactgccatattagatgccccgtcgcgtggaacagcagccacggcaatatcgactctatcaatgccaacatttgtaatacctgcgcgacgagcagaggcgtttggcttcacatagcaagggatgtggaggttgaacagtttccgagaacacggggttttgctagggacgaggcggaggaaagaagccgggctggacattttcagtcgcggtcaagcgaattctacatataattgtggatgtggaatgaagaggttcgagtagaattgattgcagtaaaataaaggagatggatgaagtggccaagacagtcatcgtttagccctaaatgggcgagccgccctacacggtcgatcccaaactagtgctatcacgctttatccttagcatacagtcaagaaaaagttgaaactcataattttaaacaaggctcagcttgcgtattcggctcccacggattccggagctcaacaacaagccaagcacggccatcataacatctagaacgatagatagccacctctggatggtgaataactttggcaatattgccaagtctaactattacgactacaatcaccaatgtagcttctaagtagcatctccacgaggatcttctctagcctaagtgttccgctcgtagctttagggaacctcttcggggctcaactagcttggatcgaagaccggtatatattatcggtctcgatagtcggcagataggcttatatatatgaatattactacgacaagaaaggtccgggaaacaacattgatttatataatacaggatataatgataagttgataacaagtcttcatgcatcggctgcttcatggattgagacaccttggaagaatgtctccaggcgaggagtcactggctcagctttccgctctctgcaagacctcgcgtgtagctccagaaaaatcttccttcagtatataaagaagtacttgctaactcaccttgctcctttggttgatacggtagaagttgaaggtcacgctatccgtagagatcccgtagactgttatatctgtcttcacccgctcgatacagtcggacctcggggggataagggccaccgttagtataaatgggaaatgttatttaagtaaaggcaccggctgggaggataacgagtggcgagggaggatcctgccccggtccgacatagagtatctcgtcgacgatgcgactgcgatgccgcgatatgcgtccctcgggtgagtagtgatctccccacaaacgccgctctgaatagagaacaccagcttctaccggaacccaaaacatatatataggaacgccgatcgatggaggttgccgtctcgacatgagtctcgtcacacccctacttgccacctaggatagagacttctcctaggcactcgcttttcccggatccgcatcatcttccaattccttattcaggtaacgcagaactggttgcgggactgattagttggtagcaactcccacaggcaggttcgacttcttcttcggacattcgtatgtcatatgtcccttttccttgtacctcggaggctatcttggcccacgtccctaaatagcaagcccccattcaaaactagcaggcagatattcggcggtaaggtattcaaagcggcaagcagcccggctttcgacaaatattgtttcgctgcgtgctgagggctaagcgttacagcaccggcttgggcttgaccgtgtccaatcaaggcgattgtggtttcacagcttctttggggttctcatccataacagcaggtgtgcgtcctgtaccatggtgaccttattaatttcttccacggtttcgacccgagtccatccgcttttgccagctaacagcgctggccccaaaatatcacgtcgtcgaatccttagccattaattgtttcaagtagcagggcgggagacgatggaaacaccgagaaccacggtttgagcatatgcgcttgggaattgacaccgtgatcgggtgaacgtataatggaagcgtttggtctccttgatattggcagcgtcgaatcatacaatgaaactcgaatatataattaagcgcaaaggattgtggatgttgcatgggatggggtaatttaaatagaggtcgagaaggaaagagggagatgaacaagatgaaataccgacttaggctcagccttgaagtagttagtaatgagatctaagcgatggtatatagtataaaaatgtgtagagtaaggtgtagatgaaagacagatgagagatagatgagtatgatgtgatatatagaagagtgacaacaaacctatgagttagcttcggctcaggctgaaagaagtcaggaataggatctgggcgatgaagatatacaacatgaaggtcaggtcacatgactccatttcttgttcctaccacaaacctttagttccttcctttttcacgtaactaaagtcatctatcttcatagaccacctcgggcagatcaccattacacgatgggaccgaagaggcgtggagttcccttcccagcctagaatatggaaaaaagcacgaaaaatatggcaccaaactttgaaaggatttcgaaagagttcaaggaagcatccaaatccacattcccttttaagacattcattttcgatccagatcgcagactaagaccaattttgtggtcaccaaaggaaggtctacagcggcatcatctgcttagtacgacaatttaagacctgtcattcacaaatgatccatatcgcggtctccgaaaggagccagatgctcttctccacaatctatcgcagccttttccagctcttatcgcagaggttggatgcagtgagtcgtataatgaccttcttgatgacatgaatcggttactcattaggctagaagtctccaattcgcttcatgcctcagttgaaattgcctcagggcttaatatcaccaacgaggcgcttgaagtgcagtgccgtgcagcggcgcaaatcaaattgtcattcttgttaagtggatgacggcatattttttctgtatgtcttctttagaatcttctttggcatcttccttagcatattcttggtgaaaagcactcttcaagcacaacaggagaagcatatccatccaattttccggatgatagacccagtagccaagaaagatgccaataaagccggccagcataaaagacaaaaagagaacccaagatcttggttatgttataggagatttcattagggaccagtgtaggacagggtaatttaaagagaagatgagaagtagacagggagatggagaaaagaaacaagatgaaatatgtcgaccactaactatgtaccgaagagatgaagccgtcacccgactccgttagcacccacacctctattgcagaagagactcaagatctgcaacacgagtacctctatcctcggccttctttttcgtctctcggaaagcagcctgcattagactcctcttacgctcctggatcgccaacacccgctcctcaatactatcttccatgaccagtctccagactgtcgtctcccgcttctgcccaagccgatacacccgatcgacggcttgatcctcgatagcaggcgcccaccaactgtcacacaagatgacctggtttgctgcaacgaggttgagaccaacactgcacacgctcagacttgcgaggaggacagtacactcggggtcgttggagaatgagttaatggagttgtcgcgtttcacagactgcatcttgccatctacgcgggcgaacttgatcccgcgctgcttaaggtgtggctcgatgagatttaggaatgatgtccattggctgaagactacggtctttgttcctggtgcctggccctgagcagtcaggatcttgactagggtctcaatcttgctgcttggactgtcggggtcggcctcaacgatgtcagtgtcttcacccagttccgcagctggggagacgagtgtgttggtttccttgatatctgcgcggcagagcggacacttgtgttggcgttcgataacctgctcgatgcagccccggcaataggcgtgggcgcaggcggttatgacgggttgctctaggttgtcgaggcagatggcacacagttcttggctttctatctggagctgcagcatctcttgtagagcacggacgttctcgggtgtcagaggcacgactttgtgttcctccaacatgcccatgagtttgtcgatgcggtttttgcagagcgcccagtgattgcagacttgacgaagtcggagaagaacctcgagaagatgagagtatttagtcttgccatctttgtccttgaagtcgagaagagcaccctgggcctcggttctatgattgttattagcaaatttgttttcactgtgggtagtcactcgatacatactggaaagcatggtacttttcctgttcatgagcattgaacttgattctaatgagacgagacgtcatctcgggtagcttcaaattgataaagctcatatccttcctacgtcgtaagcagatggtgcccatgagagcctcaagcagcagtcgagcctcgggctctcctgcagttaagggtcgaatcaagacactgttgaagatccccaaatcttccaatccaccggaaaacttaaggaaacgtatttgcgcatacaaatccttcagagtgttgataatgggggttccggtcagggtccagcgggagtcggcacgtaagccacaagccgcaagggaggctttggaactgggattgcggatggtatggccttcgtcaagtacgacacgacgccagtgcaccgaaaagatgcccttagctggcgtcttatttgctttcgggttgaagtccagggccagggctccatagctagtgattacaacatcatacttggccaagtttgcagcttccttcttcccagagccgtgatagatcaagacactcggggcggtctccttatgggcgtggtcttggatctgatttctccagttgctcataacaccgacaggggcaatgatcaaagtggtcttagaggagcctgcagtgagaggctttgcatttgaaagaatcaatgagatgatctggattgtcttgcccaagcccatgtcatcagcaagaataccaccactggcgagggctggctccgtggctgtggcataatttgttgcgatattgagaaagtcattatttttccgcttccacaattgcacgatatcatcagagccccttgcgggaaggcttggcgattcttgcttgatcatccaagctagtccttggcgctgatatggaagcaactgggtggaaaggccggctggagtatcgaccatcggcaaattaaccaggtcagactccttctgtccgaaagtttccacaacctggccaatatctcggggattgaaggtggagctctggttaaggagttcctccaagctttcactttgctcgccaccaagtcccgttggaatcgagaggttcgcatactctgggttctggttggcttgccattttgcagctttgccaagagccatggcgcgagctttctttgcggcctccttctgctgtttctcggctgctttctctgccttgcgctcctcgtgctccaactcgttcatttggcgcacaggaagcttgtccttctgcattcgttgcttcagattagttcgtctggtaggctcgcaagttccgaacagtttcaaatcaacagggcatgtataatccccaatcgcaccagtcagcgtgccttcaataatgagatcacgagcatcctttgatgacgaacgttagcaaaatatcggaagcaatatgattggagattcttaccatatatgacgccaacttagctgccatctgtcgtggaatgtggccgatttgggcgcccatgacattagtaaccttaatagcattgctatcgtattgattattagaatcccgaattatgatgacccgttcacctgggctggcacgacccctgtaaaagcgtacaccaacgatctttgtggaaacgatacctattgggtgctgtttagtatggtttctagatcatccgtacacgagggaccgagattatgtggaaaggagcataccatagaggattgagcttgttaaagaggtttcatccacttcctgggacccttgaagcacatcgagcgcttcctcatcctcttcatcggcgccaactacttgcgacaactgattcaatggaatgaagtcggccgactcgccaaatctctggcccgaactagtatcctggtccaacggaatgtagtcgacagtctcgccgaatcgttggcctgggctggctttttcggtgttcaaagtcgcagctgtgcggatgatttttggcgcacgaccagcgtctccggtagaaccgggggccttgcgttttactaccatttccccccggcttcacccaacaaagttgatataaactttggcaatgatgatgatgtggagattgtggactctcggagaagtgcaaatatgtccggggccctgccctctcaaaaaaatactctcgctatgacaaattcaaaaagcaaaagaccgcgcaaataactgataaagaaattgttgtctccagagcttgtcatatagagcgctaactatttgtgacgcgtcgagacacggcttcacgtgaccggggagaaaacggataagtcacgtggcatcgacgctgataactcgccgcccgctgagtggacgatcggttgacaccccgggggcgagacccacggggggtcttcacaagatagttgattagtcgatgtatgaggtacgataacaagctgattatcgcgggcaatttatcgaaaatattcgtgtcctgagctctctcaatgcatcatctcgtccagagtactgtttcaatcgtctggatatagcctggatatagcccggatatagctctttgtcgtgcggagaacaggccgacggggtatatcccgttccccggattttattcgttccaaggctgtcggggagttcccaccagtgtcttgacagccctcttcctacctctttgcaaattatgtccgtttcgcagctcaaagtgatgccgtcctatcagccattccaatgtctcatctgtcaaagtcgatttactcgacacgagaacctcaagcgacatgcaacgctacactcccgttctcaggccgaggcgtcgcttccctgcgacttctgccacgctaccttctcccgtcccgacttgcgcaatcgccacatgaagagaaaacatccagagcacgagcagcaccgagtgacgaaaaggacacagcgtcaaccagcacccagacaagacaggctgaattcttctgtatcgccgacagcaatctcgcctgcaggaagccagggtggcttgccttctcctggatctgtgcattccagtccaggagaggagacgaggtttgatagcgatgcaatctggcatccagtgatgcggtatcagcagcagttcgacagtggccaccccgcgcaaaacccaaatattcctgcgccggggaccgggatagccaagacgcaaccgacaagaggcctgttacaacaatcgacgacgagtgactctatcctcatcgatcagattgtccaggacgctacagatctggagcggagcttactattagggacatccttcctgaaacccaccactcaccttgacaaccaactacatccgatggccaccgcacaaaccgagccactcaatacaagtctagttgaatacaatttcgaccacccgattttagatagattatcgccaaatgacatccctcaactccaagacgattgggccccgagtcccttacaaatttcacgaggctgcaacttatttttcgcctcggtctctcatttcctcccctttctccattcctcgactttcgatccgacacaagttcctcctcatttggtcctcagtatgctctgcctcgcctatcaatacggcgaggacccggaatgcggggatcaagaaggctcaggcgaaagcttttctatacgttgctttcataaagctcgagctgtccttgcttctgacgaagagaggccggacgcttcgacgatgatcaccacactggttcaatcatacctgctccttgaaatctgtgccatgatgtacctttgtggcgacaattcggcgtgcggcctcaagatgcattcgcacataatctccctggctcgtgctggacgaatgacacaaccaatgactgttgagtctggtgcgaccgcagatttggagtcattatggcgggagtttgtcaaagccgagtcgcacaaacgaacccttttcgcggtgcatcagatcgacgcactctggtaccaattcctttccattccccgctcaatctcacacctggaaatcaagcatgatatgccttgtccagaagaccaatggtcatcatcctctgctgctgaatgggcccatcggcagctcgttgcaagaaatggcggcccctcggtgacatacaccgatactgttcgacgcttcctttcctctggtgatgagatcgcctcccttccatcatttgatccgtacggcgccattaacatcgcgcaatttctgatctccagcgcccgggaaatctcaggctggtccacaatgacgggaatgctgagcatggagcgattcggcgcattaagatcatccctcgtcgcacttagcccgtttatctgtcccggtaaccactcggcacaaacaaagaacgtgactccatctgcaacttgggagactgccatggtcgagctgcagatgtggtcaccatcccacactggtggcattgtggaaggaagcatagatgccgttctcagtcagtcaacatatttgggaccgtctcagtttctgtgcgatgccaacacggccaaagctatacaaccacatgtcaactggttcttacgatatctcgacgagacgctcatgttggactctgaagcgccatgggttactctgtctgcgtacaaagcctttctgattgcctggcagctaatacatggtggcctgcctggcgcaatggaagttgtgggcatccgtgatggtgatatggagggagctctgatgtgggcgagaaaggtctttcaacgaagacggaaatggcagattgggaaactcatcttgtcttgtttggatgaattagagaaatgaattacggtcttataatgctttaattatttacgaatgtgtcttgtgttattattttgcaggtttgaacaattcaatcattcccaagtataatccactgttattttcatttccctaagctagaatatcccataaccatgtgacaataaacccataccgatcccagcaaacacgattaacataataacaaaacaacataatcattgatcagtacatttcgtaacgccagccgagctgtaccatttcctctgtgacgccacccttgacgaccttggctatttccactggatctcccgagtccagacgtttgttctcgcgcagaatgagccagcggtatatcgtgattgtgatagcgaacaagacagcagcacccataagcgtgccaaaggcaacgtagaaatgaggctctccaaagtataggtatgaggcccagatgttggacgtaccaccgatggcattgaccaaggcagaggcagccgctcgctttgagatcggtcgtgcaaggtgcaggttgatggtcttgtagaggagaagttggggaccgacggaggcgaatggcagtatcatcatggagaagtagcgggcgccgacgttcgtagtcgccatcgggatgatgtacatcgggatcgagatggcgatgcacatgaggatgatggggtagacgaggttctttcggtcggaccagaacatgaggccgtagtagacgatgccggcgaggatataggggggtgcggtgaggagcaaactgatggtgctggagaagttgagcgagctcacgagggtggggaagtagttggcgatggagccttgtgtttgggacagcatgttgcacatgatgagcagcaacagcttggggtctgcaagggctttcataaatcctttcagcacgctctcgttctctgtgccctctgcagcaccggcttcggactcgagacgccacacggcgcagtcacgctcaagcggggagaggatacggctgttgtgggggaattctggcatgatgcaggcacagatgatgccgatgccgacggtggcacagccctcgatgatgaatagccatctccagccgcggatgccgtggtgtccatcaagttggaggatggcggcagcgaaaagaccaccgaaggcattaccgacttgctgggcaatgtagagcccggcaatacgctttcctagctccttctttgtgtaccaggcagagaggtaatagatggctccggggaagaagacggcttcgacggctccgaggatggctcgaacagcaaggagttgaccatatgagtggactgccgctgtgcaagccgagatcgcaccccagatcgccacggcaccacagatgtacatgcctggtcgggagaacttcgtaatgatgaggttgctgggaatttggaagggcaagtagccgacaaatagaatggaaatagacgtggcgaattgctcagtggtcatgttcagatcgtccatgatgccctgaagttttgctgcactcaagttctgacgatcgatgtagttcagaatgtacaggatgccaatggttggaaggatgaagaagtcaatcttgcggacgagcttcttgttgatggcactgaactcatcgtcgctgagtccgcgaagggactctggcatacggttgtaggcatcgagttgcccttctgctgacgagacattgtcttcagccaggatagactctttcttgtccacagggaaggacatgacgacggtagtacttctgttgccaagaccacagcaggtataaacgatggagactgtgcagagtgatgcaggttgcaggctatgtcctccagacgatacttgagctccccctatatagttcgacgcagtctctgcccttgtcggcttagcgtagagtcattacaaatatccgatctcggtcaatagatgaccaggatacctgttcaaaaaatctcgaggcattgattggtggagattggtcgaggttcggtcattcgtagttgataagtgagacgtgtagataggactggagataagcgcaccaacgagcgtccaatggttatctgtccaattggaatcgactaccccggatggagagtttggttgaaatctggggtgcatggagctaacatttgggaggagctcccatattgtcgataagaagtttttgggaggtgcaggtggagatttctttcaaacgcagacgagcttagtggccatgtagaatatatctctaatcataggggcaactcacatacaatattccaatatttcgggagggccgctaattttggccgttaaacaagataagccactccgaagttttgccactagtctgccctaactccatgcaagagctccatgtttaccatgtcgaagctccgcattttagcttgatatttccaatcttagtctaaataaatgaggggcttaagaatacgtaaaccaataaatgatacttaagctggcataccatcaacatcttgtcttcatcttactcacaaacctccaacggacaataccaaaccatcacctctatttccaatatctactatcacaatggcttacgctactcccctcactaccacgatcgataaccctcgcttgagacttctcaacaagctcaaggccggcgagtacccgctcatgaccttcatggccatcccctccatccgccaggcccagatcgttgccttgaccggcgtcgacggtatcattattgattgtgagcacggtcacattggtgacgatgctatgcacaactctgtcgctgccatttccgcccttggtgtctctcccgtcatccgaatccgtggccctgcccacgatatcctcaagcgtgccctcgataccggtgcccacggtatcatggttccccagatcaacaatgctgaagaggccgcacaaattgtcgcttcctccaagttccctcctcagggtgttcgtggccagggttccgctttccccgcaattgcccacggcctcaccactcctgagtacatgaagtccgccaacgagaccatcatcaccatgattcaaatagagacccgtgccggtgtcgagaacgtcgatgctatctgcgctgtgcccggtgtggacgttgtcttcattggacccaacgatcttgcccagtccttgcttggatacacacctgctcgcggtgacgagcctgagtttgttgctgctattgataagattattgctgctgcgcgcaagcatggcaagtgggctgctcgcatggttaacaatggtacagtagccaaggaggctcgggagcgttacgataccgtcgccattactggtgacaccaaggcgattcagaactggtacatggcagagtttgagattgcccgttcatgacgattttatgttaccttacgatagactttcatataaaaattttaaatagacaattttgagtttcattacttcttccccatgaaagtttaactacggataacatccgatctagctcattacgtgtcttgctcggtcatgagaatgagataaaagccacgaatccttttcaagccccgagacatattcccttgctgtctaatctatctggccggaaacagaaaaaaggaagaaataacaattcatttattcgcattttacatgaaaaaaactgctccaccgccgtgataatgaagattgcccttcgtcttgattggcaacacgcttgatttacgagcagaagcttaaatacgaagtagtcacacacactacgtaactaatatttctgacttccgggagtgatccgcacttgattaaggccatatttagttaatatagtagttaataattacatagcatatcgttactctacataatatgggcaacttgatactcagtccaaaaagaattttatttttcgtctatattgtagccattttcataatatcataatttatgcttgcgcgatgcactcaatctcaataacggtaccgtttccgggggcaaccgcctgaaggcatgagcgagctggcatgggttgtgggaggaaatcgatgtatgcctcgttcataccagcgaaatccttcatatcggcaaggtagacgttgaacttgacaacctgctcgagggaagagccggaaagctcgaggacctccttcaggttctgcagaacggttctctgtgtgaaagcaaaaaaattagccaatgccttgacacccgataattgtttgtgcaattgaacttacagtagcctgcttgatctctcctgtggcagtttggcctgcgcagaagacgagtccggggactttgacagcagggcctggatagcttggtcagtgatgttctttctttatttattccaatagaatgcaacatgttttgcggccagatactcacagttgtgaggcttggtagggaacttctcgctagagatgagttgacgagacatcttgttggtagtttgaaaaattattggagtgtgttgatagtgtagtttcaagagtgtgtcaagaagtttgaactccagaagtactagacaagagcttgtttaaattgctcgagctaccccacacgcctctctatccgaggcatgctgctaatcaagaagaggggcaattttcattatcacgacggaggagcagttattttttgctaatgatttattcgttatcactttcccagcagatatgctgggaggagttgagtggggagtagagtggagtgggaggagtgggaggagtgagaatgggaggagcacaatatctggagtcgattattgcggccatgtttgtaaaaaggtctctcagtgcgtgaatccccgcgcagtaagcaaagctgactatctggccgcaatctatgcttgtatataaatctaactcccggcaacacccggtggagatcgtattccaatccaggactagcgcaaaccttgtagattatgcttaagcgctaacgtccatagatgccctaaggtggaggagcccccgtggttccgttcatgataacgaaagatgacaaggcgagctgaaaataggaaaaatgtggagaagtttagcagggagcacccagaatggcaattatcatgcccagaatccagtggcgcactagcgtcgataaccctcctgctctcatctcatctaatccggatgatcatgccagactcacctccccggatatcggatgcacagatagggtttcatgtctctccattcgattagtataaagatatagaactcgatcagataatcttctgtattgtcttcagcatcgatcacaacatcgaacagtctttgaacattctttgcacatcaactaccatggccgtttctgctcccttcaatcctccttcggctgacctgcctggcaagccttttgtcccaacatgggttcccccgccgatcactcagcaaaaggagaattttgctgagcttagctccattgatctttctttgctggactcggatgaccctgctgttgttgataagcttgttcagcaggttaagggcgccattcgtgacgatggattccttttcctcgagaactacggaatttccctagagcaggtaagtcttggttcttaggatattctgataccaacattgctaataacatctttcaatagctccaccgccaattctctcttgcccagtatctttaccaaaacatcagcgaagaggacaaggaacgtcttctgttcgatcctgaaactggtgtttggtcgggttacaagcacccttacggattcaaggtaagaggatctccctcatgcatcaagaaaatccaagcctatacttactctccctttttgtgattagcgcgaacgcggacctgaagacggtatcgaacaattcaactggtacaagcccgactggagcgacatcaaccgtgtgcccaaatgtcttcaccccttcatggacgagatcgaagagttcgccaactacctgaccaagtccgtcaaccgccgcctcctgactctcttctcccgagtcctcgagttgcccgatgactatctctgggataacgttcagtcccacggttgcccaactggcgagggctacttccgccatgcgcttttccgccccgtccagaagaagaccgaggaggcatccaagggcctgcgtatgcacggccacaccgactttggtctgacaacattgctcttctctgtgcccgtctcgtgtctccagatttggggccgcgatgaaaagtggtactacgtgccctacaagcccggtgcgcttgtcattaacatcggcgataccctggagattgtctccggtggccatttcaaggctactcgtcaccgtgtttacaagcctcctgtcgatcaattgcaacaggagcgtctctccctggtgctcttcaacagttccgttggtgatttgcgcatgggtcctgccacaggttagtagattcgcacattggttaaacacaaggactacgctaacgtcatattttatagcttcgcctcttatccaaagagtgggctgtgttgaggaacaaggtgtctacaaggagttcaagagcctcacatcccaaggaaagcttgtgcctaccaaccgtcaatggcgcgagatccagatcgctaccgctactgatcctacggatcaagagcgcaaccgagttggtgctgaccaggttcttattgatggcaagattatgcaccaacgggagtacatgggtgtcaaggttgtcctgcctgtttaaaccaaaatgcagccaatgagtggaagtgtttgttgttttgatattattacccctgttttcctggatgatttatgccgacagattgtatgcaagattcatatttatatatagcgttggaatttgagagttgttataattatacatttccaatgtgtaaaatttgtagctcactgcccaagtgtacatacagccacggtgaattagggacgctaaatatccttaacctatcatcaaataataataattcttagctaatgttcttagaatggaagttcagaaattgaaaacggaatactgttacagcttctttccaaatatccccatattatcattaaatagagactagagtccctaaagcactaatcccaatgaggccttaatagagagcgtagcagtgtagaggtgatataagttgtgtctttggctatgactcaatttctacaactctccttggctgaggcaggacaattgtatatcatctcacattgtggtttgctcctgtcttcgaaagtagtattattgagatcttcgactgccacacaaggactgtgtaaaacttttatttttattcttgatatcgtgaaaagagcgagaccgctgttaagttcagaaatatgtgaataaaatttggctctgattctaaaagctattttaaccctccagctaggagaagactctggcccgtcatgtacccagtcttcgctagcatagtaacaacattcgccgtttcttctggagttcctagtcgcttaagaggaatactctctaccacttcagggtacgctgccgcagaggaaagcatgcctgtaccaccgatcatagctggggcgacgtcgttgacactaatattgtactctgccagtctggttgaaagattcttcatcataccggtaagaccacccttggaggctgcgtagtctagattggaaaactgaatcagcaattgccttcaaggaacaaaaggccagtggaccaagggcagtggattgacttacgacagccgttaattcctccaccctgagcggcgatggaggacatgaagatgatccgcccccacttctgggccttcatgtgctctaccacgcctttgacaagaatgaaggcagcgcggaggttgatattcatagtgaaatcaaactcctcaagtgagatatctgacacgtcgggaattcgcttgccatatccggcgttcgatataagaatgtctggacgctggccgtgctcaagatcaatttgttgaaacatagcctcgatttgatcgccagacccaacatcaacctggtggattgaaatgcgaaggtcctgcgtggcattcttggagcgtatatctgcgacaatattgttcatggatgtcaaatttgtcgagtaggtcaaggcgagatgaactccatgttgtgcaagttggtgtgcgcaagctgcaccgattctagagtcggccgcaaattagcttcatgaccttgtataagctgtggatgttccgcttaccctccagatgcgccggtgattacggccaatttacctcgaatgtcgttgaatgccattgcgaatataggaagtgcaagtatactgatccagctaagagattaagatgacacagaacaagatattgaacattgtgggacctcaatattaccccggcattggagattccccgttatcgaaagctattcctgacagtagactgcaggtcaagattgccatgatacggagtatcttccgtgaataagaaaagtggatagagtgggttcgtcaatgaagggagctcctcccaagttgccaacgtcagcagccctaaagatagatagtgacaaggctattcaaagcaaacctcattatctatctatcgttaatattgagttctgttaatctcgagttatgtgttcattctccaaactttgttttcggcgaagatagtcagttgcgctcatggaaggtggttgtagcaaggggaatcgattcctgaggttttatcgtggcctgaggcattagaggtcacacttcaaggcacgtgatgatatctgtaaacgtcactatcaattaagagcaatggcctgtgaaaggcgtggattcctcaaattccgaatcggtcatttttagcgcatccccgcgtactccatattattgaggcattagtggcgcccccgtgttccacatggccgatccccgctatggctcctacagggatctggccaaggactatgagacccgacttgataccctaatagaacaagggatctttaagccagtttttctatatcatgttgtcattctcaacattatacccttgataggtctggtcattcctcgcagcaagggcggacaatatgttcgaaagggccttttcgtcctctgtattgcaattgcaatcgaaattttccaaaatcgacgggcaatcatcggaggaaatggctacatgcttggtttgatgaccgcgtggtggttagtatggaatgccacgttgtttgtgtttacagaccttgaacatgatttcaagcgcattgaacggaaacccgtcgatatcaagtcaaatgacgccaagacgctctgctcgaacaatccaacatgtacacaacaggacagcaacctttttatttggcggtcatatcccaaaaagttctggcatcgtctggaatggtccgctggactgctcttcaacctgagggggccagagtggaactggcggacttcccatctgggtcctcttccacgaccaattcacgaccaattgcatccaggattcgtgggtaaaataaaggcacatgaaccctccacatatcccaacggcaaacaccgcttgcaggctgcctttcgaaagttcctcatatcttaccttgtgctggacatcttgaaagtcatagtcctgatgcctgatccatactttcaaggcctcgctccggctgattcactatcaccatttcctttcttctacttcacaaattttacattgcatcctgccatatcccagatctgtcgtcgtctatacagcgccataagtgtatatactgcactcgagttcgtgacatcgctcaatccaatcttcttcctggggctatctcttgcattccccaacggggctaggaagctgaccgccgcaccgttgggtgcttcatggctatattccgatgcattcggcccattcttcgtcccggtccttgatgacggattggcgggctgctggggtcgttggtggcatcaaatcttccgatacggatttgtagcttcagcacgctggatcttatccgtgcttccggtcggcttggcttcccatccccaagtccgtcgtgtcacttacgtaatggtggctttctgtcttagcggctttgtgcatgcctgtggaagccgtacccagattgcagatacatctcccgtgtccgggccattcctatttttcgctttgcagggtgttgcaatcatggcggagcaggttttcaagacatcggtcttcccgaaatcaccttttgcccgtgcgccgagatggctgagacgaacgactaactttgtgtttgtattttgttggttaatggcctcaggtgggctcatcgcggatgactttgcgaggggcggcttatggctgatggagcctcttccaattagtccacttcgtggactgggatttgggctacaggggcaaggttggtggtgctgggatgagccctggttccggtactggagtgatggtacatattggggaagcggaatacgtgcgttatagaattgatagatctagaatttgaggttacttgagatccttgaagtcactgcatgtccacgaaataaattacatgatcgacagtttatgagacatataattatgatatctacccgtccattgtaacatcgtcatcctcttcgtcggtgtcagattcaatattcaaagtgggcaattcatcatcgctatcatcaactgcctcctctgtggcctgcgagatcagggtcgtagatgtggtggacacctgcgttgaaagcttcggggcctcagtcttgctgattgcaggagctggctgagagaaaggctgtgggttcgaggtgcttgggataattccgtcgaatcgcgccttcttggactgaacatcctgcgtctgtggtgttgactcctcagctgtgggttcttcggtataggtccgcttgtggaaagtaggcaccggagttgcagccttcgaatcgtccggcttcggtacttgcaagggcaccgacacaggttgcttcagaaattcggtagtctttggggcggcgttgtatgaatcatcagccatgtcctcatcttctgcttcttcgtcttcatcgacataggcgtcaagctcaggcgcagtcatcaggacaggcatcctgggacgaaccagagcctccacctccatctgatcagcataaggcctggtcaagaatggaatgatactcgagcctgccccacggcccttgactgccgggacagggttgagtacgctagcaaacatcgcatccttgtcggatgtcaaaataacggagcggtccatttcaacccggatggagggcggaacaagctcggcggggatagaaaggagcacggcctgcaaaagcccagatgcattctgctgaatttccaaaaacggagaggccgcttgtggctggcggaatttctgaatatcagggttcaaaaaggtatccgcattggctgtcccttgtccgccctttgactttgctttagagtcagagcccagatttcctgtagagctggaatcttcagtcgacgacagtatatcattgcagcatgagcgtaagacgtttgtcaaagacaccacgctctgtttcgtcatggcaggtccgttgaccggcaccatagagcgaagcaaagcatagactgctgaacgtaggtctctattgaacttttcgcctttaaaagtccacacagcttgctctagtatagtttgcgtgacggaggttgcgctggtcgccaatataccgacaacgttggaaagcaaacccatgcatgcaatgtgaatgcgaggcagctccatccaaagtgcctctcgctcgtcacggccaatttcctggttgaactgaatgccagaagatgcggcaccattgggtggaacagtaacagaagtgagtcgggaggttaaatcgagaatagagcccatcggaagggcaactgcagctgcagatggcattgagatgaaatcagagagaatctgcagaagcgcaatcaatctatccacgcccgagtgcagtccgctccagcctggaagtccaagaccatctgggcccccgtcacccatttcttggctatagtttggccgtgtgtgcaccagagtcgcatcgacagactcccactgctctacgacggctcggaaaacgtggtctgtcgttcggtggatagacaaaatagtcgacttgcaatcgtctttccatccagatcccgcctggtccttgggtgcgcacttgtggagagagacgagcagctgctcagctgcgtcgatcacatgctccggaaaatacgcaggcgaagaagagccaattacttcggcgagaagagttcggagctgggcattaaagggacggaagatggtgatatgtctcgggatcaattccagcaaggcgtgcaggacaatttccatgaatggggtgttgggcctcggctgtcggattgagcccgaaggagtcttcgtgatggtagagaccaagttcaaggcagcggtaacgaatcccggaagttgtggggttgtgatctcacggacaagtgttgggtactgataagtgaggtggaaaatacgagttagtgtgataatacacatctttctcgtagatatcggatcaggtttctagaaacgcattagtatagctaacataaataatggggtccaatttaattcatactgcgaggatgctgatcaagctgcgaacaataggctcatagccacgcaggatttcccattggccagcttcgactgtagcctttaccagaacaacggcggtccatcttccctcaacactgcggtcctgtaacagactcgctagtctagtcttcagtttatgaatttgaatagcattttcagagtccgatttgccagatttttgagtttgaggggtagagagcagctcagcgcaatcgttcaatgaagtcgccaggaacgaagctatcgagggtaattgctcgaccggagtagttgtcaggcgatgcgtgatggcgcgcaaagtagtagaagacatggcaactggaacagacctgtatcacaggacttgacttcaaaattagtccaattgatggaaaaatgagtgccgacgaaagatggaagtcttatcgataacttttttttccatcgaaaagctcggaccaccacgattaaattactgtcacgtacgtaatcgctccccacccctggacaatcatcaggcttcagtgaacgttgacgaccttgggacgttggcgaagcttgattgctattctccctttttgcatcattcacaactctcctaatcatggctgtaagtgttattcttgcgtctcattcaacgttttctggtttatatttcttctaaatcattgatacactcagtatttatgttgacatgcgcgaatcagggaggtaatgccgagaagggtcagggctacatcgcggccttggaccaggcgcggagccacggaaaatgggatgagctccccgaattgattcgaaaggtcacaaagcacgcatcgcagaggacttgtacgccaccggcccttggtttttttatctcagcctaaccgggctgtctctaggcctgatacagaccgcaacggcagaatcgcgtgtgattgcgtatcttcaacaaaagtcctccggcgactcatcctcttcctcaccgaatctggtcgagctgatccccgctctattgatgacaattgagaataatgacgggtccccacaagaattattgcaagcgcaggtgtgtctagggtggatacactgggtattggatgagcctgcacttgcggcagcgcgtctccctaaggatttcgcgggaatactcgatagcttggctggtggaggcgagcaacccacgtcgtggacggaggtctgtttagtgaagggatgctgcatcaagggtatgtttacttttacttccggatgtagccagttattaatctgacagcaaaccagcaaccgcacaatctgttgctggagacattcatgagtcattggagacatctgtctctctggttccatggctaagcggcggcaaattgacctcaatcaccaccccgcaattcctgaactggtccgagtcacttctgggtaatggtgctcttttggctagtgatgaagtgactaaacatgcgccctattcggatcataggcatgcagatattgccttgcaattgctcaggtcatgggcggctcatcctgtcgtgaaacagggagtctctgctaacagcccatcgaatgtggatgacttcgcctcggctcctcgggcatcggtatggactgcttattataggttcctcacagcagtcctacagggtgggcttacatataccggccccaatgatgggccggaccgcccgcaactttgcaatgaattgcgtcgcgtagagactatctacgaacgcaatcttctctctgaggtcacatttcctacggccagcacccaaaactcgcaagtcgaggaatgggtggagcaggtaattagtaactggcaagtcttgtgtggtcccgagtggcaggattcggatgtcggcgaaggaggccagaatgcagttggtcgtaatgtgttagaggtgagtctaacaacagatctcatcaaaccatatgtactaaacacgtgttgtcctagattctgtaccgggcagcaacaaggacctaccactctcatttggtactccgacgtctctttcatgttcattctgctttggcagactttgacttcgctgtgaaggcgctcgaatcctatattgagattgtcactgcagccaaagaaagagcagagaagtctgctgagtccggccagctggaagatgatgaagtattgctacagacgctctctgaaggtgtcacattattgagctgccttggctcgctggaagaggcagagaaggcccgagatctgactgaacttataagagagtatatcgacaagcacaacacgcctcccacaaacggtcttgtcaatggcaattctaccaacttgccaaatatccccccctccgtgttggcctcctcctaccgagccattggtgttggacttgcctgctgggcaagctggactcctgtgaatgaatcacgcgatgaaattagagctgatgcgatcgaatacctggaaaagagtcttgctccagagttgggatgtagctccaattattcctcactttacaccctaggccttgtcttggccgagagcagagacttggacactgcaattgactatgtcaagtcagctctgacaccaagcagctcatctactgccgtatctgatgatctttccaaagaacgtgacttggtatcgttgtggcatctgcttgccctgctgctgagtgcaaaacaagagttcgagattgctgggcgttcatgtgaggctgcattcgagcagtttcccaaagagttgttctcgaagggtcgcgaacggcgttcatcaaagaaccccaaccagcgccccattgtcagcagattgcaaggtagagaaaaagaacgcatcgtccaaactcgcattacccagcttgcatttatcgagctcctggaaggacctgaagctgctgtcaaccacagcacacaattattgagtctttttggcactctttttaaggatctggacctcgaggctggggagaacaaatccaaggcagaccacttagtgccaccaaagagctctgccggaactatcaggagcttccgtggaagcattttcggccgaaatagaacgagccagttgccagatcgccgtgctgatcagagtagtggttctgattccgccattccgcccaccccagctattcccaacggtcatatgacggatgccccgtcaatccaagtcacggacgaagatcctcacagtcgtcagccaacggtcgggagggcagactctaagaaactgaaaaagcgaactttaagctttcataaaaacgagagaccgcgcgttgaagagcctccacttcctattgagggtgaaacatctgcagacatggtcggcattgcattttctggcaacacatcaacagagtccgcgatccgtcctaacaaaggcaaacagccattgccggcgatggcacacaacatgaactataaacaagagcctctccctatcggccatgaggaacaaccccctaagcaggatgtccggctcccaatcggctaccgtttcgattctcccacaagcgccgttatgaagtatcctctagttcaatcccagaagcacgccttaggtcttctcgtcaaaatctggcttgttatcgcgggtctttatcgccgagcttccctgttcgaagatgcccgcgagtcgtgtcaagaagcttcgaaacaagccgcgcgagtggaagcactcgttgcatcagaagaatgctccgctcgatcttttagcaagcgcggctggggtgcctccaagagctctgaggagctttgggctgatgtttacgcggagcaaggtcttttgtcccaagctcgatcgaggccccatgaagccattaggcactttgaggaagcgctgctgcgctaccaagaccacccaacggcgactattggacttgccaatcttctcttggacatttgggaccagaaattaaccccagagccagcgaatgccgacgtggatcttaacgtcgcacgtctgtcattgctggcggagacccccagccccaagtctgcgcaggccatctcgaccgacgatctcaaggtatcaagcgagaccgataatgcgggtcacgaagaagtttctttatccgcacaagatgtcgagcctaagcaactgcaccgtctcgcggcccgcgatcgcgcctatgggcttctttctgcgttgacaaagctcggaagctcctgggacaactctgaggcatggtatgcgttgtcgagagtgtacgaggctggtgagcaggtcgaaaagctgaaagaagttctttggtggtgcattgaactggaggatcgaaggccaattcggcactggtccaatatcggctccggtgtctatgtcctataataaaggtaacaaaatcctgtatcttcctgtatctacttcattttggatatcctagacccttgttacatgtcacgtatagtcctactaattgtaaagggtaaaaacctggcacgtaccgcaatagccagatcaattgggcaggacgttataaagcaacgttctaccaaaaagagcaccatgtcaacccttatgttgacatgccaggttaccaattcataaccccactatttgagatgcctagtcactgtcgaagtcacattccaagtaaggttatgagggtgactagaattgcgcctggcaatatgaaccataataatgaagtcaaaggtagcatacttggtcgccgttactattggcaaaaaaacgtctttatatacatctccgcaaacgacaatgagttgtcaatgggttaaaagggaaaacaagatcagttgaacggcaagaaaagtggattgattctgctattgcaagtaaatctaccgcggagcagcaacgggagtccaggcggcgatcttgggccgggtgctagagtgacgttagtcgatacacgggaacgacagcaatatcgcacataggaaaattacacgtacgtggaataagtcttgaatgcagcgcggctctgggtcgggttggggcggggctcagcgagctcccatggacggagaccggactgcatgatcttgtcggcgtgcgggggcgcgtcaacgagataggagatccaggcgtgccttaataaggtcagttccacatcatcgcaggtacatcattgacccagtgtctcgagagaagcgcttaccagccaggctggatctgggatgcgtcgaattcggcgtccttgtagtcgatccaccgtgttcggactaagcggagaagtaccattagaacttcatgtttgaatgtgatagtatgaactgaagagtcttcttacgaggcaattcctccaggttctcgaagtatttgtttccgtagcggtcgactccgatcagagttccggccttggtatcacctgtagaacgtgtaatgttagtcaactgctgggcagatatcgatagggtggaaacgtaccaatgttctataccacagcgaacaagggcataggttagtctcgagctcattcaattgatctgctgttccgggggaggcgttcgtaacctacctgcatctggtgggcggcatcctgtacaagtgtgttaggaaacgagtttctatagggtatagatcgcaattatacgaaccttgaagccgactcggcggagattgcgcagcgtcctcacaatagtcgacatctttgctggtgtattgtgctagagcgaatgggatgcgagagattggcgatttgaggttgcaggagggcggtgtgtttgcactgtttgcaccctgctctaccatggatatcccgattcagaaaaccctcgatcttgaatattcagacatgttcggtcgcattaaagggcagacgctttgttgtgctgggcgtcgcccagccgcacgtcggagactgtgtgctcgccaattttctgcgcatgctggtacaggagctccgactgcagcatctgctccttcacctctagcaggaatcaccgcggagctagaccgcattgctccccgattcgaggtgcctgcgtctcagattcatattattgactccccggcccatttctactctacattgaaggtatcttctgttctgtttgtctcctcgatataatttggaactaactggctgttctgcagaataaaattcgcaatgcccggcggcgcatttacctctcgaccttgtacatcggcaagacagaacacgatcttattgacaccttgagccaggctctccgcggtaatccagatctcaaagtttctattctcaccgacgctctgcgcggcacgcgggagacaccgaatccttcatgcgcttcactcctttgttcgctggttgaagagttcggacctgaacgagtcgagattcggatgttccatactcccaatttgacgggtctgagaaaaaaatggatccctcgccgcatcaacgaaggctggggcttgcagcacatgaagctatacgggatagacgacgagatcattctatcggggtatgttatctgcgaactggtacaaacatggagtactaatatatttgcagagcaaacctatccgacgaatacttcacccaccgcctagaccgataccatgtgttcgactccaaggtgctgactgaatattacgctcgcatccaccatgcaatctgcagtctgagcttccaggtgctgccggaccctcaagacaaatccggctatattttggactggcctgccacaaacaaacccccttctccgcttgatgatcctcagcagtttatcgcatattcttcgaccttcttaagcccgctcattcaggctcctgccaacaaacctgcgcttccctcctcgtcaagtcaaacatatgtataccctgtatcgcagtttacttctctcctgcaacccgatgacacatctaccgaataccctgccgtgacgaccattctccatcttctgtcaagctcatcagtctatgccggggcccgctggctcttcacagcaggctacttcaacatgcaccccgtcctttcctccctcctaatttccagtactaccaccgcctcgaagactcctaccaccacgaaaggtaccgttttgacggcctcaccgtgggcaaatggattctttggctcctctggaatctcgggaatgttaccagccgcatacacacatctctccgcccgcttccttgatcgcgtcgccgaggcaggtgcgaccgactccattcaactgaaggagtggcgcaagggcactgttggcacgccaggcggatggacctaccatgccaaaggtctgtggattacactgccgcgtgaggaacaccccagcctcaccttcgtcggtagcagcaactacaccaagcgcagctacagcctagaccttgagtctggtgcggtggtcgtgacgaacgatccgggtcttatgcagaaactgggtgaagagactgaacggctccagaaagatgcctcccctgtctcgagagatgacttgatgcgaacggaaaggcgagtcggatggaatgtgagactttccatgtggattgtagagaaggttggcggtgccttctaattctcttcttggtcttttgtataaatatctcttgagaataatagcgagtctgtaatatactgatggttgaggctatcagaccatctgagtcacccactatggatccaccatttctattcgattacaccaaaatcacgcagaaggacccagaatgaccactctgaaataccccatgtctatccaaggaattatcctctcaaaattctggttcggcttcgatctagatgacacgctccacgaattccgacgggcctctgccaatgcctcggtccgcgtcttcgaaacgattcacgcctcaaacaacaagaccagcgttgatactctcaagaatacataccaagatatcctgcgcaatacaaccgcaaacgccttcacagatgggaggacttcaagcgagtatcggcgcgaacggttcgggcgtcttctccagacgcacgggctcactgatgactctttcctgagtcgtctgttagaggtatatcgagactctctacgcgaaaacttgactctcaagccgggtggattgcatcttttgcaaactttgcgagaactgggaaagaaaatcattgtcattactgcaggagtggacagtccaggagctcgggatacggccttacattgatgtgcttgtgacgacgaacgaggtcgggaagtctaagattgatgggctgtttggtgccgtgctggagaaatatggtatcgccgctgaagatattgtatacttcggtgataatgcgattcgcgatgttcaggctgcgcggcaggaagggatcctggctgttctttatgatgaaaagcagcagtctcgtttctacgatatcagtgcattacgagtggattcgtgggctattgtagaaaaagtactcgtccatggagacatatagagcatcgagacataaacataacttttgctctagccatcaagagatatcaaccctaacgcacaggaatgccgtaataaaataaataataaaaaccaaacgccatgtcatgactgggagctcccgtcgtctcatatgcagtgtaaatcttcatctaagcttttcccgaaaccttgcctttcacgccttggagtcgagctgggccgagaccggatcgcacttcgtcgagcattctgataccaatggcctcgttaccgttcctgccacgcttgtgcttggcgccgtgtcgcttcgcctgtccactggtattggggtcccagctggagaggaagtcgtccatgacgttgttgaaggtgctgctgctgtgcacggcttcgccgttaccatcgatcagactaggggctatggatgatgtggtggacatgcccgtcatgcccgtcatgccggttgcacctgtcatgccgctgatcatggacatgctgtcatcaaattcgtcctcctcgtcgagagcgtagagctgctcaaccttgtcaaatcggtcgtcaaggagacggtggccggcagtacgagccagagcggacgaagtcatggagtacgcagacgggttggtcagagcacccttgcgcttcttccggcgaattggcgttccgccaacagtgaaggtggtcgacgccatcgtctgcgatgctgcgattgtaggtgcagctggtgtgggagcattgccagccttggcatcttttttgaacttggcgaactcgctcatccaactctggtcagtgggctgcatatcgggagccggcttatcaggctcgggcatctcgcctgcatccattggtggctttacagattcttctggcagttcattttccattgagcgatgagcctcggtgctgtccggttgcacgggcgctttctccgtagcatccgactcccatccctcatcatcgacttcgtcgtcgaacagggaatcctcccagtcgccctcatccatttcctccgcattagctgttaattctccaaagattccgtcagcgtcgccatcctcgacgaaggcttcgtcctccagagcctccagcgcctctcgcagccgcgggtccatgtcaggcttgaatccagcaattgcatctgggacgttctgctgatcctggtaggttggcttgcggataaaggatgaagtggtcgagcgcatatcgccatattgtgagccataaagactgggaccaacggaggcgcccgaaccataggtatctttatccacgagcgagacctgccgcagcgcatcttccagcttcatccctcggccagccctacccttagccttctcattcttggcttcgacaaagtatgcatctccgctgccgcttcccagctcgcggagatgctgcatgtaatcgtagctggagtcatcgtaatagacgccgtagttggcagcctcgccctcatttttgcgggcactatcgccgtattcggactggaggtcagacaaatttggcaatgtcttcttcgaggtgttcgatgagggcgcaggcgcggggcctccgacctggtacaggaaacggtcctccgcactggtatcgtggatcaacgggtcattttgagaccggtgaaagagctggaacttgctcgcgttcttcttgtcactaggggcatgtcagctttgacgccataatcatccttatgcgatacgtacatccactgtttgggcggcatctttgctttggtcaaatttttgatatcgcagaaaaaagggaaaaagtgggattgatagggtcacgtgtagcttatcgcccctcgttctccggggtcctcagaatctgaactgtcggagtagttagtagtatacgatgtttaggggggggggtggttcttttccagttccactctattcgtttaattttgatttgactcattgtgcaacttcgcttggaggcttgggtattcattgggctcggcgcttcaaggcccgcatcaatagtatacatattgaaccagaagccctagttatagactatattggtcctcagatatggcttcaactattttctgctcctatatttaccatatacaactaaaataaccataaaaacctgcaaaaagtacaaaacatggccatatacttccttacctggatggccatcccgccatagaggggcttagtcagcgttatcttatccgtctgaataatccaaaattcccttttcaggtgggggttgtgtctcgacttaattttttacttcctacaacttttctcgattttagggaatcgaaagccatcgccatcatggttttacctaaatctaagaaatccgtgggactgggttccagtctcatgaacgatcggttcggaaagggcaaagcatcggctcaaaagaaggtctctcacaacaatgccatccagcgcacaggtgtcaatggtgaaacctacgtcaccaacgaggcgaaggaggcatcgtgggtcaagatgcgcagtatcactgagcaggcagcgctcgacgaattcctgagtaccgccgaactagctggaaccgactttaccgctgaaaaaatcaacaacgtcaagatcatccactccgatcagaagaaccccttccttctcacccccacagaagagaggaaagctttcctgaagcaccagaagaataaagaccgcctgactgttccccgacgacccaagtgggaccagtccacgactcgaaatgaactagaaacgatggagaaacaaagtctgttggactggagacgaggactggctgagctgattgagaaccatgatctgctgatgactccattcgagcgcaatttggaggtctggcgccagttgtggcgtgttattgagcggtccgatcttattgtgcagattgtcgatgcgcgaaacccgttgcagttccgttcggaggatctggagagttatgtcaaggaaatcgatccccgaaagcagaatttgctgttggttaacaaggcggatatgttgagtctgaagcaaagagaagcttgggctgcgtactttgagaagcacaagattaacttccgtttcttctctgctcatctcgctaaagagaagaacgaggccctcgctttgcaagagaaagaacttgattccgatgatgaactcgcccagtcggcgcaacatatcgacatacactccaatgaagatgatggataccagaaggaggatacagtggaggaagaaagggctaagcttgccgaccctgagcgctcgcttgggccacacattctggacactgacgaactggaagagcttttcctggccaactccccagaatcactaccacaagatgacgagtctagcgagcccaagcgtaagactacaatcggtctggtcggttaccctaatgtgggtaaatccagtaccatcaacgcccttctcggtgcgaagaaggtttctgtctctgccacacccggtaagaccaagcatttccagactctctacctttcgccggagattatgctgtgcgattgtcccggtctcgtgttccccaacttcgccaccactaaggccgagttggtcgttaatggtgtgctgcccatcgaccagcagcgcgagttcaccggtcccgccggtattgtcgccaagcgtatccccaagcatttcattgagcaggtttacggtgtgaagctcagaatgcgtcccatcgaagaaggcggcactggcgtccccactgccagcgagattctgcgtgcctatgctcgcgcccgcggtttctccacccagggtattggtcagcccgacgagtcccgcgctgcacgatacgtcctcaaggactatgtcaacggcaagcttctctgggtcaaccctccaccagttggcgaggacgaaactccaattgacagcgtcgacttcaacagcgacctatacgacgtcgcccatcttcctgagagacgccgagctcagctcacacaagccaagattggaaagcataccgcagtagaagaggtcaccgcggagcccaccggcgacgtcgactcggaaatccccattgaagtagccaagatttccgtcgagccagagctcggtcgcacctcccgcaaccttgatacaggctttttcggctcagaaaccggcccctctgccggccgtctgacgctccccttccaggcccggtacacccaacagggccaggagatgcgcaaggtgccaacaggccgcaaagagcgcatgatggttgctcttgagcgtggcgtggatgtctccgaagtgaaaggcaacaccggcacgaagaagcacttcaaggcaaacaagcgcctggccaagggcaagcgcaacaaccctgcggatgacgactactaaaaagtgattttcttttatatttcctttgcattgttgcttgcgctcgcaggcgagtcgagggagatcggagctctccctctgctctacgaggtatcattcttgggcttattggggcttgaggtggatgaattgataaatggtcccacatatgggatttgcatgtcatgtcgggattgacggtttatgtccatgtacatgttcatgtttgttgaggaatcatctttttggcgttcggttttacgagttgaataacgatttataccagtcattcattcacttgatcattgtcactttccttccatctaagactatcaagtccaacgtaaaaccaagtaaaaccggagcaatgttcgtgcattcttattccaaccgaactagccctacatgtaaactatatctccccattaactcaaagatggctcttaggcttgaacccagaagcaacaagcaagcgatccgcctccgcccgctgccaattcaacttggcaataaccgcatccttgcgagtcttgttctcccgcttacccagctgctgcaagtggacctcatccggaccatccgcaatgcgcagcgtacgaatcatagcccacatatacgcaagcggggtatcctggcaaataccagctgcaccataagcctgcaccgcgcgatcgatgatagtaagcgcagtctgaggaacaagcaccttggcctgagcaatctccttgagcgcgcccttggcattaccctgatcgatcttgatagcagcgttcaagaccacgaagcgggcggcatcgacctcaatgcgcgacttggcaatccactcgaggatcacgccgtgcgcgactagaggcttgccgaaggtcatcttgcgctcgtcgttgacgcgggcaatcagccactcgagcgcgcgctcggcggcgccaatcgaccgcatcgcgtggtggatgcggccgggtcccaggcggccctggatgatctcgaagccgcggccttcgccgaggaccatgtttgaggctggcacgcgcacgtctttgaatgagatgtggccgtggccgtggggtgcgtcgtcgtacccgtatactgtcaacatgcggtgcactgtgatgccggggagtccggcggggacgaggatgacggactgctgcttgtaggtgtctgggttggaggcgtcggtcttgcccattacgaggtagattgcgcagcggggatcgccggcgccggaggaccaccatttctgtattggctgttagatgttgaggatgagaaggggattgtagaggtacacaccgagccattaaggacgtactcgttgccctcacggcgaatgtcaagctcgatatttgtcgcatcgctagaggcaacttccggctcggtcattaggaaagcagagcggatcttgccctctaacagaggctcaagccactgcttcttttgtgcgtcgttaccatacttggcgaacacctccatgttgccggtatctggggcagcattgttggtagcctgataagaagcaatagtcagcgatcaatcgtatcaatttgcaagacctgcccagcaagtaaagcaatgcgccagacaaaatagaataactcacctccgaggcaattttgcttttgccgagcaactcggccatcaatccatactccaagtttgagaatccagcgccctggctgaagtggttcttaggcaggaacatgttccacagcccgatcttcttggccttctccttcagggactccaagatggcggggttggtcttccatcgctgctccccctcgccaagctgggctgagaagacgatatcggcagggatgcaatctttttcgacgaattcttcgacctggagtcatgttagcgctgaatattggtgatttgcggatattggaaataaattaccagatcgagggtccgcttggcctgttcgctgacgaacggctgggcaatgggcggaatacgagaagaagcggacattttggatataagaatgattgaattgatgcagaatataagcagaatcaacggatccggggaatataagggaaatataaagagaacgaggtcagcccatccaaaattgcggagaaggtggagaagccgagtccaagtgcctcggctcagctcctaaccggacgacttggagattcttgatatctcacgacgtcaaggtaaatcggccagatctccgagattacttgtacagaagtctatttggaactatgtatatggatcagaacattagtattcaatcattgttcaatattatgatatggcaagtaggtctagttaacaagttaacaacggagtacagccgagatatcaataagaaaagaacagacaactgccattcaacaggagaaataaaggggaaatcaaagattcaagccagctataagccaaaaagatatctcttagctacccctgcttctgcagttctttcccgaaatggcagtccattcaacatcccgaggtctgtaggaaatcgactaagccctgacactgtattgttagcagcctgaattacacattctacacatatgcatatagccatgtcacaaccaagaaaagattgcgttgattccaatgtgctccatgagatatcccaattacagttccatccatccatcccataccccgtacacacaaaaaaaagagcaaaagcaaaaggcattgcaggtcatcacacaaaagaaaagaaaagaagaagaacatatagaagaacaataaatcctaacccagacctgctcatatccaagatctcgaatctgcctttcctcaatgcatccgacacagcgaccggcgccgagtaaaagcgattgaaggaaaagaccatagaagcagagtctggggggaaagaaaagagaaagaagaaaaggaaaagaagatcgaagtgaaacacctcaaaagacccgcatctagttctcaaggcccttctcggctgaagattgctcgtagctcttcttgccgagcttggcgaacaacgattggggcttgccggcactgcagttgagtaggttagcttggattcgattcagagtctatgtgggaaaaggaaatcacatacttcttgaaccgcttgcccttgatatcgctcaatttctttgtgcaggggctcatgatgtcgtctgagggtgagacgtaggaggttggttgtctgttatggaaggttagttcgttgcagaaaagaataataggatattttatatgggagtactcactcctcgcctgttacttttccctgcaatacctggcggtggtgctccattgatgagatgtctgagcccttcaggtcggtcttgtcgctcgcgttgctcaggtgagtgttggttgagcggtcggccaggggctgagcttgtgtggttgcgtccattttgtgggtgtgtagggatttgaatgggttaaagggaggtgtagataggcagtgatgtgtattgcgtggaggattgcgtagttaaaagggaagaaggttgacaaaaacaactcggataaggtgaaaatcgtgtgttgggtgggcttcgattgttgtccgggcaactgagtatgacgccacaacatattccctcaaccttggataattgttactgttatacaggcttgtatttatggatatctaggttttcattcaaagaatgcagataactctaataacagtcacagtaggaaacaaaatagtaaacacagaaagtgggaatcattggtcgtccaaacatacacgtaatagggtacatagaacagtgtacagatgcagaacgctagtggataaagatcagaatgcaaggtcataaagtatggctaaagccattataccatgaaaggaagtatcacagctcaggtgactgtggagtatcggtaacccgggcgacatcgtccggtgtagtcatgtccaggtcatcaggccgcccattcagtacaggcggtgtactctgagaacggggttgtggtgtccccagagtaggcacagacatagacttgggagagacgggttcttccaccctgtctgtctccccgacatctcgttctggagaagaagaagacgtaggagtcggcggggaataagcagcggtcggactagtagcgctatcttgggacgagtcggagaggtttctgcgatggccaccgttctcacggtatgaggacgaagtcgggcgtgtcgaccccgggctagccgatggtgtggcgaaaattggagatgaagaccgcagactgtaggaccgagcgaccattctttgaacggcagggaattccatatagttgcttcccgacccccgtgagaacagggcgagggcaaagcagcagaggaccatgatgctctggatcacggtgactctcttttggaaaacgagctcgtctgcaagaacaccgagctggccgctgagggagtggacttcttggtggtactgaatgcgctggtgctcgaattcaagagcaacagacttccagacgtggtcgtactgctcgcggaattctctcaattcgttgagaacagtgacgttgagactttcaaggaaggtagatgtcttcgctagctgccgcttctcaaccttgttgaacgcatcgcgcaagatgcgagattgttcctcgatatagagaagagacagggttgagttcgactcgagcatctggagccgcttgtggacggacttgaagaaggattcttgggtcgtgggatttgcagatggcggttgagtgttggtaggtcttgtcgattctggaagagggctgttctgctcctcttttgggttggtagtaggtttccctgcggtctcggatgtggcgttctgctgagcaggctcgaaagatacgcttgaggcatccggagcggccacgacacttttggcaggctcgccctgttttcggatatcctcagcttttgaaggggcgggtggtgcgacattggtcgcggagggactacctccaactgcagcagtagagttctgtttcggtggtggattggtctgatccgttgtggctgacgacgatggagtcggaaaaagcggtccatcatcaatgctgcatgtatctccatcattatgcgtcgcaaaaggcgagacagcctctgatggagggtttggacaaatctcctccactgtaaggctaggttggctaggttccaccgcaggaatagattcctcgactggcatttccacaggcttgatctccaggtcttcgggaacctgaatagcttcactggcctccaactcctcaacctcaacgtgatcagagctctcgccatgcttgtactcttccatcatggtcgtaccatgcacccgaatcaagctgacggggcagaagaactcatgcccatagtgcgtgaggaactcaattctcagatatcgagcccaaataagcgagttctctactgcgaaggcttgcacctcacgagtgttgcgtgcctcatacaccccgagttctttccactggtctggtttcgcgggataccgatcggagacactaacccggaacgtgtggaagatggagctgaagaactcatagtttgcaaggacaaccgtatcaaccagaatatcatcacacatttccagaacaagaaatttgttctgcgcgcgacactcattgagcatatagctatccttattctcaatgagcacagaagaagaacccttgctttcaggattcgtcttcaagaccgtagctgcgcagtcaaaggaagcatagttgaaccgctctttgcaagtagtgcccgcatccttacgacgcgacgcatctctctggagcgcaccctgcccttgcacatccacattgcctctgccatccgcattccccgactgcccagcctcgcgagacgggatatgcgagccccaagcggtaggactagcctcgggcgtctcagcgccgaacccaccaaagtccaactcgatctcggcatcgtcgcccagcgaatccaaagcattattgattccagtcggctgccgacgatcttccttcccagcagccgcagcgcgtctgctccctccaacattctcggctgattgtccgaccttcgctaggttctgcttcttccagtcctcaaaagagaggaaattaccaccgtctaatagcgagtccgtatcttggtcctgttcggcgctctggtcggcgatcgttttcgctctctctcctggcgtcccgctcgggattataggtggattcacgaccggctcgttggctgtcgcatttgtatcgggcgccgaggcaaggtagatatcgcgacccggcccccagcgcgtctccagacacggcggcagatggaagagctcggactcggtctgccaggtactcttcgctggacatgtcgctggtgttgtgtggtgagcagtttgcgccccgttcgggggtggctgggcggtcgcattggagagcgcgctgtggcagagagccaaaatgatcgaggcgcggtatatccaaaaggtcaatgagggtcttgtggtcaacatgctgtcgatttggtgatcagatactcgcatgtataactccctcggtgagttcaagctatgaattcgacctgcttgctatgcgcatcgtggctgggagtaaaggagtcggcacgggaatttctcctaagtggtatttcgctatacgtgggggaggttgcgattaagcaaaccctagcttggcgacaagtggcggtctccagaaagaaatggatcgtctggtataaatggcaggtgatagtggaccggtggcatctcggccacgcgctgggcctgaccgcctttcaactcggtgagagcttcagggctgcaacgttcaggattcaatatacaacttagttagactacaactacaactacagactcatcatctatgaattacagagaatcatattcttcgtggataatgtttgattttccctttggactgttccacgaaactagttacagtataacacaatcaagagaaaacggccacggtattccaccacgtaggcaaatcgacttcaccgcaactcattccacctttccctgaagcaaccacgtcaatcgtgtagttcgtatgaaagcctctcgccagaattaaatatccaccagcgcgttccgagccagccttctaaccttttgtagttgtgtatccgtcgtctccgccagtgtccttgatcctcggtctgatattgtacaggaagaagaaaaaaaaacagtgtggacgaccagggaggatgatacaatgcacgtggcaatgcaccgttggggacggacggaaacagacgaaacacccaatccgagaacaaagagacataagacagaaagcggaagtttattttatcgtgggcatttttgaactttttttcccaactgaatcgaaacatgcaagcagacatcaaaatgaggggagagtatagggtaagggtgagtgaagttcgagtgaatgtcgacaaccctagaagtgagtctcatgccaaccaccgacaagatcgagatcatcgtcaacgcttccatcaagaggaaggaagctgctggggacatggctacgccaatcctgctgttcgagcaaatggcggcggcgaacctcgacaggcgatgcgggcttggacttgccctggtggtatccggaagtacctcgaccccaatcgtgtcgccgagtattggcagcaacactcttggggccaaacacctcacgcgacttgcggggcttacacttgtgcagttcgtcctcgggcttgtactggcgtcggacttcaccgagcatggaccacttatcggcccgagacggctcgtgtggggagctccgcatggggcggggcgtgctactcgacgcactggagtcgctgtcttcgtccaaggaaagatcccccaatacatggggttccatcttcagatccacatctgggccgtgagagcgatggttgggggaagcggaggccggctcgcgcaatcttgggagggcagctccctggctctcttggctccagctgcgagagttctgctcccgtcgttgagccacagcaagatcctcattctcagactcttcttcgtcccacatgtcgcaccaactctttgagatcttgtcggcacctttgttaccaaagaccatcgacaaggaagggagcggcttcgtcgtgtgagacggcagtgatccagtgatggaaaccggatcagagcgaggaagagacgggcccgcacgcttgcggagatcatcacgcttacgaagattgagcaagacaaaggattcactgagctgggagtccaaaacagaagccactgaaggggattccatgcgagacgagaaccacgaggttcctgcagcttcggaagctgggaacagatcctcggtgtagctctcgttgtccggaatggcagagagttgtcggatagcctggggaggggtcgactggagcgccttggcccatgggaaagcatctccctggttgacatatgggctctggagagatggggtgcgaagtggttcgcggttggcgctggcaggaaccacctcgcggtcctcggtgcaaaactcgtcaagagattcgtcgtcggtagtgaacgagaccgcgcggaggatgctatcacgcacatccagcaaagaccgcttggagggatcaatggtcaaggcatgagtcagaatctcgtacgtgtcctgcgacatgttggggaagatatcgaaaagcgactggcgatcccgcacatagtcggcaaagagtacatcggactcagtgggggtaacgaatggattccgagcaaacagaatgttcaacaggcagatacccacggaccagatgtcggccttggcgggggagtatcctgtcgtggtcggctcatattgctcgggggccatgtagcggtcactgccaacacacgcctcgtaacaccacgagtctttcgtagcgagaccgaagtcgcctagcttcatggaaccgtcctgtgtcaggaagatattctccggcttgatgtcacggtgatacaagccattggcatgcatgaagtcgacggcactaattagctgcagcatgaaatcgcggacgtgctcggtctccagtggaccacggttaaggcggatggcctcgtataaatccccattggcacagtactccaaaacaagatatgtatgagtgtcggtgttgaacgtatgaatcaagttgaccaaattcgggtggaacccgaatcgtcggtgacactcgagttcttcgaagccggaattcgttgaggccttgatgagacgtttgatagcaacatcctgaccggtcttggtatctgtagccaggaataccattccaaaagacccatggttgagtggggccacggttcggaaacgaccatccaaaagttggccttcaacgaactcttccttcaagcactccatggtcgacatgttggcctgatgatccaaaaaaggacgaatgcagagatgagatgaaaagggggagcggactgatgtaatgctccaacaaagagatgaagtgaaaacaggtctatgaaccgctcaaagaacacttacgcttgtgaagaatgcgtcgaagtgtgataaacaaaaagcaaccaggctaatgaatattaaaaaacaaggagaagaggtatcaggctcgggatccgaaggtaaatagagggcgagaaaagccgggtgtcaggaggttgagatgaaagggaatcctgacaggagatgtcatataaaaaaaatgtactggtgaagttgatagacagatgaaaagaggagagaatggaggcgcagaggcgtagttgaacccagggggttgttgatgctaaggaaattggtaaagaccgttatgtgctcatttgtatgtcgtttttcgttggttaacgggaaggggtcccaggtggacgacacgaatgtgtcaagaaatggacaagtggttggaaagtcggcctgataccggatgaagcgaagagagtcgagttaaagcgctgcgtaatatcgtaactgaaaaaggtcaaagatgtatagggagaatcctgtgaacaccgggttcaaggtcgaggccgtgactcaagttgaagaagataaataattgagattagtgagtcatgaggccaggtagtaatgttggggcaaattggttgggcgaattgagggatccggtagagtacccttctaatccgagttggaaaagcagagatactctatgccaggttgcccctgaggtatgaaacttcgggagtgctctcggaccaggctcaaccgaagaaacgtatgattgaccacaacgcagcggacaccttcgtgtggattggagtgacgaaggctggaggtatcgatagcaaaattgaatccgacagaccgggatgaggacacttttatcaagttgaagaaagtgagtcacccgagctcagggtggacccggaagacggaggaaaaggggtttaggacgggagaggtcgagagtagtactctgtcaaaggtagatctgaatccggccttcgaggcttgaagctgtataagagtacaatcgtccggggttggcaatgtcttgatatagatggcaagcagacacggcaatcttgggaaccttgggagcgttggaagtaataggaaggtgacggagaagtgatgcgggagagatgattcggacaggtaggaaaggcggaaggagagatggggatctaggagagcgaaaagaagatgatcgggaacgagatgttgatggtataaggggagagagagaaggagccagggagagttgagaggtgttgtaaaggcgtgaggggaattggagaggccatgtgattggctgtacggtgtaatacggtaagataccagtctcccctcgtggacggtccatccgtgcgatctgcgttacccaccgactttggccggcacctgcaggtcctggggccgtttccgtctcccggggaaactggtcacgtattgaaataataccggtattgacaacggggggtccgtctaggctctccaagtttcatgaaccttccaggcattccttatccttggaaagacgtcaaacgtctacgtgatcgacttcattgtcgaatgttggaatcggggtctacgataacgcgataacgtttaaattccattgttggttgcctctatcacatcatccagccctatctttcagatttcagacttccaactctctggccttcagactttcgatcctaaactctcgagactcggggtcggccacaagccagtcacaatgacgggcgacatcagcaggggcagccctttgtcttggagctcttggagtctcgtcggccgagggcggatcaaggtggcgcgctactcccaaagcgtataattgcgcagccaattcttggcagatcagccaatcagaatacatgatccggccactatttacaagctgcatgacgcgatagagtgggatggcgtgatctcctctgattggaccaccccggatacctactgccagctctcttccaaggccggtgcctatgggaaggtacgaaggtacccttccgcaggtactcatgcacggcgggcctggtttcggagtggaccaggacaaagaccagggtttggcttctcgattctcccagttacaccactcgctgcactattaacgttattctttgccgcgcgggatattatgagacaagattcgtctgacccatattattgacccccccgatatggttgcggggttctaccaatacgctatctctaactatatcagcgggtaaccatatcgatgatcaccagagttgagggagtatggagtatgttggatcggacccagttattgatgtgtccgtctccagtagtaaatggggggttggagaacatctcaacccaagaactactccgtacaaagtacaagacacgtatgttgtacttcgtgtggagcgtgctcccaactgtcatgattcccaaccacctttcagacacccacgcagccctgtcaagcggtgaagggaatgctttcgctgccaggtggtctggccttggatcaggtttgaccgcttcctgcggcctgcaaggccaaaccttgcaggtctcgaggtgataggtacgatgtacggaatatacctttggattcaaagcatgctcagaagtaccagtacgtggacgcttgaaacgatagagttgtgtggctatgtggcacgacttcggtttccggcaactcctgtgcatcacgcgacgtcccatccattttgcgtctcatcaccccatttgattcattctcggagatcgcaaccctcccaattgaattcctgggctgtgcatcggatatggacataaccagctcgtttcggtacattatctacgaatgcattgtacctagcatattacatcgctccgatatagttgtacacaagatactactttgaatccattgcagtgagatctgcaggaagtaaagtgcacggctcagtatctggtcctgatctccccctccatcacacatcagccattgccgttgggtccgtgattacattctcgttctctgttatgcagtctctcgccgagtataacatatacgtcaataacgtccgtacacgatctgctgcatcagtacatataaaaccccctctaagcattcgtcatctacggagtgttgcatcaaaggaaatcgatcagcctatgacagtcgaccccaacgataaattatatacaaccgccctatcagcccctagcgatgaattgaaacgtgtctcttacacttaatacttgggcgcctgcatggttttagccacgtacatgactccatattgactaccatgataccgagggggctggagttatcttccgaatgtggtatttttgatatgagatgtgatatgagatacgggttagttacctatcagttcgaaggttctacaagttacggagtagactcccggcgctgggggaagtatcctccgatagggacgataagagtccccagacccgaggcagaagagacaaccttgggcgtaaacaaataaataggatatctacggtttgaatgaatcatcattatcagagacgacggtatcactaccataccccgcacgatcgtcattccatgatcatatccaggcgagttgagaattttgaatccgtctcagtcggtatttgaaggggtcatgatagtcgtgctatgggaggccaatgatgggttggtaaacagtgttggacaacatacagaataggatacatgcatacttcttagccagtgtgtatttgatctaatgatgagatcactcttatcatgagaaatgacatgccaagccaaaagagggggtcagatagccgaatagactgggagccacttccccggattttagtctcagctagttttcctcaatcgggctaacctatattataccaaatatgtagaaccctgtgcatgccgagctattccttgaccttctatatacacgagctgaagccaccagaactttaacattctaaatattcaagtccgagtgcgagctcaatgtgacttgagactaggatatcttaaaggacccggcacagtgcatatggcctgtgcgactacggagtacagagttctacatgtaaatctccagggcatcaacatgcatcaacattcatctgcattgcacgatgtcctttgtacatcgtagggcgatcccagcctcctgtaggtctctttttctccgtgtgcgactgtgcgttgctgcaggaaagaaagcagagattggaattttcaagatcgatgcaagggtccttattccctgaggcttttttttttggggacgcatcatgtgagagaagtttcttgctatctcagtatgttcatgcttgacagtttgagtttcttcgtacgttgccgagtcaacacgggcatgttgtgtcccctccattttcgccttacagatcgagtctgtcgccttctctgcggggggaatgtgtcggcgaattggctactagatgtgcagtatattgcatattggctttctacggctccgttgttgtagttcatccaccctacgttgttccttgtatgctctgttcggatgtcccatgataacattatagctatcaggatgtatattcaatgctaatataccccaaaccctgatatccattaatacagattcggtgtttactattaatacggtggcaacatatagtacaaagtataggaggtccaaaacaaaacaccgtcctcggcctcctgaccccatgccacattccataagggtcctgccaacgtcattccaccctgacatccccctttccgttccaggtggatcattgttacacttgagttaataaatcccaaatacagagtgtaataaaaaagacctcataattgagtgacgttgagagacccattattatttgaaacgaaaaatgagtaatacagtggagaccaggcagcgccagatggacctctgagggccatttattgcttctatttacagattatggagtacttcggatggtattgggactcattgagctccgcttgcatctagactctgtgttcatctggtcatggcgatgcgtgttgaacttcgagtctgtggcgagtggaatcggtgggagcgtactccgtacaatggtcgtgttgggaatcggcaacggattcgcgctctgtctcttggagttgggtctggttgaactgtgaatatgtatcagccggataacggatgtacggagtacgagatacatcctcaggtgttgacatgatgttgacattatgtggatctgattgtacgcttggccacgtaggcggatcacataagttgattgtctgtcttcggaggcgaatttatatttgttatcttatttggttcgtgtagttaaagcaattgtttattctggttgttctagttcctatgtcgaaaccaaaagacgctggttgtttatatttactcggtacctgaggatctatattgtacgatatatctctgataaccacttcatctcttcaacatagaatctactaccaaaacatatctatagatcaaaatcttatacaccctagcacacatacatagtagtttgacttatatcacccattgaagtcgcgacggaggcgatgattcatagcaggatggcctctgattggccgagaacccccagggttccgcgataaaaaaaccgactgactcaatatcaaacccccaggatgtcgcgagaaaggtccattctcgaggatgcaaaatgagcaagcgctcgctcgaggagtccagggcaggtgcacatatgtcgcccgatcccgacaataatggcttgctgcccatccaggacctgctctctcctggcgaggaggagcacggtcaatcctccggaccctccaagaaacccaggaacttcattgcgactgtcgtaagtgcccaatttgcctcgcctattttttccgcgacgcgaccgagtcatccggtgcccgctaatcccaggtaataggcgtgtgagacttgtcgcttgaaaaagaccagatgcgatgaatcgcggccgaggtgtggactatgtaagtcgcttggcctagagtgtgtttataatgagcgtaaatcttcaaagtaagtcgtcctcggtggttttcatttcatgcgcttatacgatgcagacgcgatcaatctctcacgatgatcatgagcactctccatcgcctggagacaaaattggaaaatatcccaacgtctatcttgggtgatctgcagtctcttcggagccaaattcggcctgtccgagagccgcagacgcagctatcgcctgcctttggtggcgacaaccagcccctatcaatgctgtcctctatcggggacaacttcacgcccgcggcaggagatggagatgactttgaattcgaagagaatcaaccaaagtcagactctgcaggccggatttctatttctttcagccagcatggtgtcatcgtctggcctggagcaagacagatcctcccgaagcaattacttgccgcttatgagatgctcgggaaaaactatgtcattgaactggaatcagcacggcctccgctgccgatgtttaccagtccctatccgttacaagcgggagatcactggctagaaatacttccgttggcaatgatcaggggtctggcggatgcgttcttcagtgtttttaacccctccacgccgattatggacaaggggttcttcttttccttcactcttggcacggccatcgagagtggctttggatataatctcgagagttgtctagtgcttaacgtgctagcattgggctgtctcgcggttctcgcctaccaggaaggaaactatcctttgccgggtactcaggcccatcgatttgaacctccagaatggatgaacgtggtgtacgaagaacagcctggactgcggttctttaatgaggctcgacgacgtatcggcttcttgatgtgcgacaacgatatccagagttgtcaattctaccttctttcctcgtacgtatatatgcccaagcttactctatacacagattgatactcatcttctatagtgtatattataaccagattcctcgtccgatggattcctggacaatggtttctcgcgctgctacttgctgtctatcaatgttgataaagtgagtcctgccctaatcaaacatctggtatgatactgacgcatacagccataatgtgaacttcgatgaatgggaaggcgatatgaaatcccgcgtatactggaactgtctaatgaacgagaccatcctcgtacaagagctgcacctcccaccaagcggcctctcccgtctcgaagaacaagtcccaattcccaaattcatcggcttcgaaacaaccggctacgcctcgaaccgtttcaactcatccagcgtagtggacgactcatacttccaatatcatttcctggcccaggtagcccaccgtatcatcctcacgcggatccgccattcactctacttctactgtgagtaatcccgccaatccacccagacacccaggcaccctctaacacccaccctccattagcggattcaggaacattccccctcccagcaataaacaccgagctacaccaccaactagaacaatggcgcaccaacctcccaacagcaatccaattcaacaacgccccctactcatcccacccaaccccagcaacaccctccatccacacctccccacccgcctcagtagcatcgccagcccacctctcctccccaagatcaagacccacagacccgaaccagcccctttcccccgcaatagcagtagcagacgccatgcttaaaggccggtacatgatcgcgcgcttccacatcggccgtccgtatctatacaaagctctccgcatcccgcacctcctaacagacgaagacttcgtgcaagtgcgcagcggtctgcagaatgcaatggactggccggttactcagggtatcttccggaaaatgaagagctgtattccgattaagtttgctttttgctcgcagtgagttttgcttctatgttttcctttgatgcctaagactacgtgtttgggaatctttaactgacttttttcttgaagattctttggtcagatcttgctcttctattgtatagctcattcgccaagtgcccgtctccgtgagacgctaccggatggctgggaacgatggaacgaggagatgctagggtttttggaggactgtgctgtgcatagtccagctgtcacgcaggatctggaactgttgcggtatctatggcctgataattaggtgttttgcgttttgcgttttgcgttttgcgatttatgggatggggtatattttattttgcgagagatggattctgttcatttctatctctacaactacctttatggcaatttgtttatttgcgcatggggctgagtagattattcgcagtggatttgctattgtacgcatctagtaggccatgacgtgcaactggacaactattggaaggcaccactcgatcccaaacaggcaggaagggactggcaagggactgccccaaggcaagagcgttcctgggactctgcctgaggaaggaacgataacaaaagtgggtataaattgaaagttaaggcagatattgtaacctttatttcatctttcacgtgtgtacaagatcaatgtttgaatccgaatcattcagtatagctatgtctatatacaagggctaggcctcatttatcatgtagcacctgcttaagacaaggaagggtattgcgaaaaatcaaaacgaaactagaacaagtgtttctgcagggatattgtctgaacaccacacgaacaagatactagacgacaccccatgccatgatgcatgggggatgcatatcagagagcccaatcctcggccgtttccgattttccgatgaagggtttgtcaatttgtttgatggcatggtcaccgcagaggatactggaaagatggttagtgagatatactaataagttaatagggaaaacacataccaggcttcagcgaccagcccatctaattccttaacaatctcctcgcgccgcgaggaagagatatcaccactgctgagctgcgcctgcagatcccgaatatactttttcttgccaccagcaccgtccaagacttccctacccaggcagtcactgtggaaagaatgctgacaggggaagacgaagaactgacggctgagaactggtagcgagcagatccagcacttctcacctggctcaacgatggcgtagcgagtatcgagaccggaaatctcaccgcggatttggcgggctgtcagggctgagttatccatctcctggcggagcgagtcaatgtggcgcgagtagtcctctaaagcagtacaaatctcatccttgaagtcgtcgatgacgacaaaatcggggaagaacgggatcaggtcctcgatgcggagcagctcgcagcggcgcaggaattcaatcgcctctttgatacctgtgcccggttggcggatcttcttctcagcgacgaggagccatagctttttgcggagcttgtcgttgccctccgggcggtctgcgacgatcgcagcaagttctatgtctttgtgctccagggctagctctacagcttgtagatactgccccattgtgctgtatatgtgaatgcatgattggattcgttgattctgaatgcataaacgaagtgcgaagtctgcatcgtatggagggtggggtgacggttgcgattggagataagtaagcagtccagcctcagacggtgaaggactggaggcatgtattgagataagggtgttgtggactgctgcggatggatttggatgattgacaatgatgaagtttagataccggacggcttggttctggttgagggaggagacgatggctgatttgttgtaattcaacaacgcagggatcagtctctcaggatcaaggttcgtttgtcgcatcaggatatcaaccaggtctgtcggcttgtgtgtcatgagcacgctgctatatttgtagaacacatcgggttcgctttgccgctgcaagaccttcaaggcttccagccatttctcgcgctgaatccagtacgatagaacatagttgtaatcgtttgtagcggttgcgaagaacaacaattcttcctcccgcccgtggctgctgataatatcatatactgttttcttgtccaagtctgctttgtggctgttcacgaactcttggaaatcagttcggatgctgccaagctgatccttgatttctccagtgcttgtgccttctgccaattcggctttggtggcgatattgtcatcgagagaattcaacttcgacatgaacagttccacaagccagctcgcgaccattattctttgcataagcgaggcctttttgtatgttgccagctgagagaggaggtagttccgcaaagcatcatgctctttatgatcaatcatggtaagacaaacctcctcgaaccctttactgctcttgccccatactttggctgcctcgaggaagttacccttagatgccaaaaaatcacccgaagcagtcatgacagcatctcgctgggcagcacctcgtgcatactgaagggcctcatcgaatttctgctctttcaagaaggttctccagacatctctatcctcatcacctgctacaacttcaaaaatggcctggctggtgaagagccaatacgtgtttttggtgaggtcagtcaagaggcccagagcgctttgcccagcttccaacacgggttgatcgtggacaacctcctggctgagacgattgactgcgaccactctgcccccaacaagtgctaggacatgccactgagacagagtcatggcagaaatggggtcttgtatcaatttccgccctcctcgcggtgattcagaagctggaaatagcgagcgcggaagcatccttgccgtcttgaatggaggttccgacgtaagttggccatgatatatcccctcggagctgagccacgcaaactgcttttcggtataaccctcggcttggtaaccctctgaaattgtgggcgaaattaccagcgaggatggcgcagagctagacgcatttggaacctcgtggatcactggcgtctcgcgctggaaaaggtctgaatacacgccgctttcccttccatgctttgagactcctgtccggccaatgaaatgaagtagcttcccataggttgccacaagcactcttctttgatcaggcgtagaggacactgtttccgcggcgattccgatcaccggagaggcacctggcacctggtagacgggggtggtatacttctcctgccggtagctggagggttcaatataagtctcgtagatgttgccatcagtggcaccaatgaggatttcccgagtagatgcagtcggtaaagacggattccaagcaacgctttcgattgacacgccttttaatcgtgccaagggtttcggttgtcgcgacggtgactgggcatggagatagtagttttcgccgagggtcgtggtgataatcaaatgagatgccgaagggtcgaggaacatgcgccgaatcactcctatttccgaggatttcttagggagatcgatgtctattcatgagcacggttaggtcaacatgttgtggctggcatctgctgcggggaaggttcggaagtttaccttcgacatcttcaggggaatcaagatcgattcgtagaatgcgattggtcgatagggccagtacaagcacgttgtttgcgacttgcgctgcaacgaagtccgcagcgacggcgaaggccaactgcactcgttcaacgtcgaacattgggagggaagagctcggtggctccattaagttgctcggagcaacataactgctggatgggtccagcgccatagtgcgctagctgtaggggcactatgtcatgccgctcatagaagagttgaggcaagccgagggttctgcgagtttatgcaggacggaatgggctcttgaggtcagccctgatgccttgacacctgaggccaagcactcggatcaccaaatcagaactatacagttaactagttacgcagatctataacaaggcaaaataagcaaatttgtagacatctatgaattctatcataaattgcaagtactaaagtccctccgctcatgtatcatagggtatcatcgttgctgaaacatgcgacatctagactgtggactgggtatctcaacacaaaaaaaaaaggaaatcctcgcatcaccagcctcacatcactacacattcccgatctattttcctgttcttctccttggatttctccttggtcttccctttattcctctcgcgatccttcgttcggcctctcccacgcttctccttgtgctcatgtccgaatttcgtatcgtccacagtgtcatcaatctccaatgcggactcatcctctccattttcttcagtaaatccgtcgttgctaatcttatcccgactaagccgttcagcaaagcgtgaaaaagtggcactgattctgttttcactcgtttggctgccagcacggcttccggggctacccctggtcgatcgagatccaccctttgtgctctcctttgggcttccttcttccgtcggtgccagcctaggcgatgaggacggaatagagcgcggctgaagaccagctgggttactgatttctgagaatgccatgctaggtcgccttgcgatactggctaatgttggcgcattattctcgcctggccctgtgacctcaacacttggtcggtcagaagaaaagtcttccatgctgaaatctgtttggtcgcctagtgtactgccgtctgacgcccgagacgatggtgggttcggaatgttgggcgcagctgggtctgcgccgatcggaagaatttggtagaacagaagatagggagactcggtcttcaatgcttgatcaatgtcaaccagcgtcactcgttctgcggcgagatcatcgaaccgcatccagtgttttgatgtctccgaggattccgggcctgtggcagaattggggcaactggtgcctcgaacaatggaaatgtaatgtcccgagtcaaccgagttccccctgtggcaaaccagagcctgcaaagatagtttaaagctcccataaatgggagcattcgcatccatgttgtcgtcttggatgaagtgaggcaggccgatctcagttgggatatcaatgtgtgtattgagtctgactgccctcccatttggcaagaaggaatagcgttttaggcacatcccaagaatgggccgttttgtggaaaagtgtgctgcaacttgcgcatcgtttgttggcgtattatcggtataccatgctaagcaagattaggtcagttgatgcaaaacttcaagaacaggacgaaagatgacttacgtatcaaactgaagaattgccacgcaggcatcattacctctttcttgtatgaaccccttcgctgttgcgtatctccagtagtatcttgatctgcattggtaactttctccggattcggatctgtctttgtaggatcactatccggaaagaaccgctctcgaacaatactaccatttcgacccggtacccgagatgccgcgagggattcagtgaactcatcaaacgatgaccagggggttggcttttcgacccgcgacgtagttgattgaacaggagacatagtgggtgtgctctcaacctccactatttcaacatgtgaagtggatcccttggatatggagagtgaatccattgaatctctcgcggtgttgcgtcgttccatgtgtcgtttgacttcaatgatgttattgaaataagcttccagacagtcttctagcgtgagtgaatgtccatcggttggctcaggcgggatggcaacctcgagaagtctctcattgatgaacttatggtcatcacttgcatcctcctttccagtatgaaaaatatccatcttcaatgtgagaagcggcagctctaactttccggtgatgaaagtgaatgcttccgaagcatcctgttgctgaagtttggccgcatcttcccagccacattctgctagggcatcctgtaggtgttttgtctgaaaccattagtcaataccagatatgagcacaataacaagtgttaaactaaccatatctgtggtgataagcttccccgatcgtaacagattcacccatagccttagaaggatcacaagctttcgacgaggctcatcattaaacgatttgtatagaatggcttcaaaacaatcgagacgggcaaacatggcgaacaacaatgcatctaggtagcatgtgacaccttggcgattctctgcacctaggagcttggtgttgggtgtgtaattcctgatgatgccctcaattgagtcctctagtagaagtagcaggccgaatgctttctctgtatcgccttgtgtagcttgcaatgcataactaatgtgatcttcctgtaaggcagtgattcccagttgtttaattcgttgagcaagggctttgacctagatgtgaatttgcaacgttagacaggtgcaagctgaccgttgtgcttagccataccttcttctgatgatcgtgattatctgccagtgaagtctccgacttgaagattccatggaacagaggacgtgaaaggatatgggatgcctaggaagtacagaacattagccaaagatcttgtgtttaggcatcaaagcgttcttagcatacctcttctttgctttgcttgttcaacttattgtgccgatcgcgacgcgtcaggaaccgatgaattccactcattatcacggatcagaaaaaagaaaatactcttaagagcagagtttaaagatcgaaacgaaaatcccatggagacatgcgggggatcatgagaccggtgttccgtaaactagctcacaacttagtcaaggctgcaggatttgggggaaacgcatgtataatgcatcataagtagagctctttcaaaacgaacgaaaagaagtaagatagtctcgaaggatttgaagtcgatggacgaacctctaagtgatctgcggggcagagcgggaacagagaacctaagccggagatcgaccttttgctgccctaaccttggaaagctctccaccgcctaagtccgggtgtgggcggtgacgaggaacttccagaacatttggagatatgaagtatataagtgcatacctatgtgtgtgtaggaagattcataagaaacgacaagactcatataccacttcatcctagcaaaccccaaagattgtcttgctcggtgacatgttcgtctagtcgacgtcagattcagattcttctagaatggaactattacaactatataaatgtctaatttagtggtattccaaaatatacggagtatagcataggaagtctaggttaaaaggcaggtatttacatagtatctagtagggctatgttcttatatagttatatagagccctataagctcctagtcttgtccttatagtacagtagttgttcctcgctctataattgcgtgaaccatacctatatgtatccatggataggtgtaggtattgcattatcattcataccgcagacctgctcctctaaatagccgtccagcgaggagtcaggaccctactaggcaaagattgctagcccactcatcaccccttgaggattgagtaggaatttctagccaacttcatgcataataaggaatatatcccaacaattgcagtagtaggtgcggtaataactcggaacaagccctatgtttggtcattggatttggtcaagtcttcgcggatataatcacatatctaacatctatctaaaattgaaattgggcaattccaccataacggaatatgacgaagacttcagccgagcaataattgacgatcaggtacgtatccatggatgagttacggaggacggagtagttggaggtggatatagtgcctgttttgtaaggcgttattacccagtcctcacgtgacgggattatctgcgcgaacaatttttggtaagggcccgggcttatcctcaatccatcacaccccatttttcacagaatggctgccagagagccgtgcagatacctaacaagggcattgccccgggcctcagtgccatcaattcgccctcaaggctttttctcgagccgcaatgtctctgatgaagccccagccaggcgtctgtcggaccacctaaccgagctagaaacggcgtcgtcgctgtcaacacctgtcccagacagcgcagcagcatcgttcgatccgcttgcacgagcatccgctcgcaagacccagcttccccgaggccggtaagagcactccgactacatcttcggtcatgcgcatctgcagacatgaaaacaacatcgaacatactcaatgaacaataactaactccgacaccttatcacagataccaattccgctcccccaaatacaaccgtggtcccctccaccctcaccaaccgccgccaccatccgacccctcctcccggctgttcgtgccaggcccattctccgcgccccgagcagagcagaccttcgactcaaccgtctcccccgacattatgaccctgtgctacgtgcacacgccaccaggcttcaagccgccgccgaaatcggcccgtctccgcgagtgggacgacagctcgccatatcacaagaaccgtgtcctccgcggtccccgtggcggcgacgtcctgcgcctgctccgcaagccgatcaagttcaacaacatcccggaaatcgagcgcatcacaatccacagctatgtcaagaatgccgcggctgagcggaactcgtcttggctgcacgtcgctggtattgccattcaggccatctccaatgtgcgcgttcagactttcaagtccaagtctaacgttgctccttggggtattgcggcgaaccgtgactccgtcgctgtaaaggcagagctgtatggcgagaacatgtaccacttctttggtaagctggttgatgtcgtcttgccccgtatcaaggattgggagggtgtcaaggggtccagtggtgatagcagtggtaacatcactttcggtctgattccggagaatgttgctcttttcccggagcttgaggtcaactacgatatgtaagtgttctctattctatgtttctattgtcttgtcaaggctaaccctgcttcataggtatcctcctaagatgatccccggttgccacatcactctccacactaccgccaagaccgacaaggatgcacgacttctgttgagtgccatgggtattcctttctacggcaagatcgtgaactaaatcgactacttttggtatcttattatatctccttttggatagtcttgtgatatccagcatgtaactttagagaagacctgcataatggtcgttgttattattggaatcgtgtactatggcttaaattcaatctacatttacggcgaacaacagcacacagcacaggatgattggaaagtgtcaacaggaatctttgctcagttgcatcaactataataccgagaaagcacccatgacccagataatcggtcaataaagggaatatcaccattatacgtaacatcatattacatacatgcatcgagaagacacagaagagacgaaagggaaaggaaaccgcggctaccgctaattatgggataggtgtggacaggaacgcgcaccggagcagttcatcggcagtaggccgctgctcgtagtccaggtggaaagtcatgtcgaggaaatccacagcctcctggctcacattgtctggagcaggggggcgagccttgttgctgccgatagcgaaaatggcttgcagctggctgcagtccgggaaggggtgggcaccaatgaacatctcgacaacgagacagcccaaactccagatatcggcttttttggtgtgtgcggtctgtcgcacgacttcgggtgccatccagtacacacttccctggagggatgtgcggtggatattggcaccagcaccaccactggcccgggcgccgaggaggtgggatgcttcgacacgcttggagataccgaaatcggagatcttaacaccacccttgttgtcaactagaatgttggcacccttgatatcacggtggatgatatcccggccgtggaggtatgatagaccggctaagatttgtcggacaaagttcttgacaaggggttcttggaaggtgttgtactgcttcagcattgtggcaatagacccaccaggcacatactccaggaaaatgttgagatactgatcgtcggcaacggtgccaagatattgcacaatgttcgggtgggacatgccttgcaacagctcgatctcatgcttaagagcatttaccatgaggttcttccgttggtcgaactctgtgccctttgtagcagatgggatttcaacctgcttgacagccataagctctccagtaatagcatgaagagccaggtaaacgcttccgaaagaaccctcgccaatcagagatcccttcatccagttctttggtgcaaagttatttccagccaggaagtccacaaggccatcatcctcttcttcgccatcctcggctacaatcatgctcatgcgatcgttaaaggaaccgccatctgtggccacaacactgagactctcaaagctctggcgcgattgccgcgattgattcgcgtcgtcggagccactctcaaaggagacataggattttcggttgggctcagtgggtgactcttcttgaagtggctgaagggaactagatgctatagaatcccgatatgaggattgaggtaggttgaacttggaaactgaaatgggtcgcgggattcgtactgcctgtgccactccagggccatggagccatgcatcggcaatgctgggaattggaggtaaatggggtaatggcggtaggggaggggcatctttcatacttgatgcaacgctgtagttgctcataacactcatacgactggcggcacgactcaaacgttgagatctgcgcatggtcttctcgatgttttctcggtcatgactggggaagaatgattgtaattcgtgaataatcatctcacttggaggtctctgtccgaagaacgagcggagtttagccacaggattacgttcactgttcggaccttgcgattcatcaacactggagttggatgggcggtgtcgagggcccagcggagaaagcggctgcttaatattatgccaagattcgccggtaagttgctggatcttgtgtttctggcgctggttggaattactcagagcatgctggtgggtggcctggctctcatcatatgcaagctgggatgcacgacgaagctcgtcttcatcgggctccccagcatgaatcttccgtagaatcaagcgacctcgctcggacttgttgtagccatcgcaaatctccatgagctccgattcggtgagcttccggcaatttgacaggtctgggtccagtccgtctaatacatagaaacaataatttctgtattggtgttcaggaagctgtagtttcttcaaaacacacaaaataacttcatctggtgttctgcagttccgaatatccaagaccttggtttgtccaccggtgtgtatgacacggatgacaggggagtttgatgggagggggcccatcgtgagaccgtcaagactagggtttcgaggatgggagctcggtcgaccttcgttcggagtagggggatttcggccagaacttgagccacctgaagatgggtgattaagatagtccttgcgccatgtgcctctttcggcgtcaccggcaggtggcgacgcaggctgagacagcgatttgctgttcagataagcatcatcagccagctgagatgtgcgtcggtatggtagccgggaatgagtatagcgggaagaatttgacagcgccgtggcttcgagcgcagctaaggtattctgtatcgaagatcagcataaagtagaagagacgaccgatttatggcagacagacacccaccatatttttctgtcgtgacgttgctccggatttgtttctgagttgcttgatagcgatgaagatgcgcacccggtcgcccaccttcttgatgcccatctcttgcaggatcttttggtcgcattcgagtaaattatccccattgaaattgttggctgtaaatcatcagtgacatcctgggtgtaaagtcgggacggccgtgcgtatgcgtacctctaaatatcgactcatattgcccacatttgatgctatgaagccatgagaccactcgtctctcatcccaggcactatcgatagtcagaatcactgcggtatctcggataatttctcaaaagccataccggaccgatgcaagctcgtctaacccctcggaaagctctgaccttgttgggctgacaaaccccaccccatcctgggctcttgtagccgtcgccggtctttgggacgaatttgtgtggtatgcggtcgatgattgcgacgcagatacacccgtaggtgcagaatactgcttaggagccaacatggctgagccacctgggcaggtcaagcgaatgactcgtcgggttcacgtgctaatcgcctgcgattgatcgacacagcgttctttccttcactctcggggtccttcctgtcaggtcgaacgggggatccgaataatgataaggcgtcggtcaacacataacctcggcttcctggtattcagtcagcggcatgttccaggtggttttgattctcactcgccccggcggggggttgctgaggggtcgggagagtgaacgacacagcagagacaaccacaatgaatattgaaagacaccgaccagggtaaaacaatggtgattccagcacagcaggcgaaatcgaaatgagggacctcaccgatgcaacttaccgtctagcttttttgaggggcgagaccggggttaggtggtctggatcgggttatcgagatcacaactccccacttgggaacgagaaggtggttgacagggataaaaatcgggaggaagtcaaaggttcaagagatggagtttcgggttggagtttggaatatgaaacctccagggctggaacaccgggagttctctgactaaggtggtacatgcagcccgtatcaagggggaaagctaggcccgatgttctcctccacgcgtttctatctctgagctgtctcatcctagtacccttcggtgttcatccaaaaaaatacgtcttgggctacttagtggggcttggctatacataatagctgctttgatgacttcacctgcgcttgcagccatgaagcaacacgtataattaggcgccctgctgtatatattagttggttcgtttaacgatatataaatctattacactggtatttcccctgctttgaaaatatatacgatgtacaacctctctctataggaagtactcagagactttgataaggttatgagctgtagattatacatattgctctccacccccttgcctaacgctatagattgtcggtctctagaggttgtttttgccgatatattcagtgacatgaacactagttatagacgagctggagctagtaccatatccttttggccagctcagacagagtttcagatagagatcacctcaactttcagattggctgtttcttagatcagttccacaaatttccttccctttaagcccaatatcggcgataaggtactaaaatggaaaggtgagacacacgagcccccactgcgatatgttcttattttttccttttccatagtagtagtggtctacagggtacatctattttacgaattagtatatttgaaacaaggagaggatcaaagaacttctctccgaacgtgccgaaccaatgcttctcaggctacactttggtgtctattagggctttgattttgattggctcctcgtgcttcttaagcttttcatcgcatatggcggctcgcgttcagcgaacatatcactcattttgggtaagagcactattcactaacgggatatgacggtgagaactatggtggtagaaacacatgatgctaaggccgtggacggtgggtgggaggcttaaaaaggtgtcaaagacggcggtttctgacctcccatttgtttcattgatatatagaatacggagtatatatatatatgttctatctagctcctatggaacataggagccaccgtttctgtgaaccattgtattttctttcgtccttttctatctactactacttcatacttcatagatagggcatttagacgggagccctataaccttcacctatagtctacaaaccaagattgctctaggcataatgtctaccccgccaatgcttcagatgtactttccggcctaccctatctataccggacgactttcaatcgagtaaggctctccgcaccagtggagacccgagcgcatgcatacccggcctgggtatcagcatcaaacactaggctcattcccaacaccttccacaccgtagagcaagaggatcggccctttgcatatgtagaatgagaaataacaatctcatgtgtttgtatcctcgagcccatatagttctataacacgtgaccgtcccctcactgtgggggttttagtccattttccccgctcaaacagcccgcggcctcaaattcttcccctccctagtgcgctcccccattccaccccaaaactccaaaaacaatggaggacgaaaaatcagccaaatctaaaaagaaagctgtgactcatcggaagtccctgtcgtgtgaatattgcagtcggtcttttgctcgcttagaacatctccaacgccatctccgcacccgttgagtaaccccctcttgctcccggcttcttggaattcgtctaatgtaggacaacagatacaaaagagaaacccttttcatgtgacatttgctccaaatcatttgctcggaggtaggcttatattgcgctcaatccccggaatagaatgccaatcgcttatcaaatatgaattttccagtgaccttctagtgcgacatgagcgattagtccaccctgctgaaagtgcagccagtcgagaacaccgggttcagaatggtcacgagaacaaccatgaaataccaattcagtccaacctcatccaacccgcccatcatgagtcgcgcatgttagagcttgcagatgccatccctgtccacacccaagtgcctcctccaccacctgaagtccaggtccagactccatcgattatagatacacctcactttaatccctcatggggatatgatttgaatcttttatctcatgccgcaagccatgtcgctttggagggtcaacaggaaagcctagagtccatgagaaaaccacaacacacagccactcctacgtcacaacaacttcctcatgtccaggagagggcaattgccgatagttatggtgtagagccttcgattcttgatctcacggatcttggggaccctgtccaggattttacggttttcctggaaagcgtgggtttgtcgtctgattgggactcgggcgtgttctcgtcggtcgaggagcccatgctaccaccgagtatgacaatcgattcgaaaccgccccgtgagccgataccatcacgacttggcggggatatcatgaatgacccgcggggtcccgcggaagatcccccgtccttctcgaattttggatcccggctgccatcactgcaaccggaatctcacgaaatggacgaccgtatcggtctttccgacgagagtacacgacctgcatgggacatctctaattcggatcgccaatcgttcatttcgaaacttgaagaattttcatatgttctcccgaaaggatttgttccgccatcgcggcatgccctatcgcggttcttcgccgggtatatcaacggattgaacgagcatcttccttttatacatgtccctacgctatcggttgctaaatcctcacctgaacttacgctagcgctggcagctgcaggttcacactatcggtttgagaacagccggggcatcgaccttttccatgcagctaaagcgattttattggagcgactccgtcggcgagacagcaagcaagtgcttcagccgtcatggaactatatatccccatcatcagggtttcctacctctcgtggttcatccatgatttctaacacggcgggcagccctttccaacatcatcagcaaatgtcaaatccacccctcaacccatcaatatacacgctagatgactcagatgctcatatggaagtgattcgaacttttttgctgctgactgtgttcgcgtcctgggaacgccatccagaactcttgcgggagattctctcgcttcaaagtactttggccaggcttgtgcgcgaacatggcttgtctgaatcaccttccacctcagaacctaccaactgggaggagtgggtacggagagaaggtaacagacgtacaaagcttattgtatactgtttcttcaacctccactcgatcatgtataacatacctcctctgatcttgaacgcggagttgaagttaatcatgccgtgttcccacgaactctggaaagtgaccaattccgcacaatggcgtcgcgtttatcgcgccagacagggatcagatgtgcctttccaagaggcctttgccagactcttcctcaagtcatccatgtcaactccgtcggcacctatatccccccttggaaactatgtcctcatccacgccattatccaacaaattttctttgctcgacagctctgtctttccgcacctcatatacagggcactagtttgagacccgacgatttgaacgtactagacaattcgttaggcgcgtggaaggctttatggaagcgcacacccgaatccagcatcgatccccagaatccggccggcccaattgcattcacttccacagctctgttggggctcgcctacatccgtttacatgttgacttaggtccctgccgtcacctcatcacacaagatccagtccaaattgcatcagctctgaatgagtcccctgctatcgcacgtagcccacggctgatcatggcgcttcttcactcagcccacgctctttcaatcccggtacgactaggaattgactttgtggctcgaacgcattcgttcttctggagcattcagcattcgctctgcagtctggaatgcgccttccttctcagtcgctggctactcgccattcccacaacgcactccgagcagagattgtcggagcatgagcggaagttgctcctgtggatcaagagtatgatggatgaaaccgaaatggcggttgatccgcctggcgcaccagatatggaattcatggcgaatccgtacaaagtgcggcagcttagcgttgcgattgtccgcgtctgggcgcgcacttttaagggcaatactagctgggcgatcgttgacttggtcggctcaagcttggatgcgtatgcggatctcctggaatattaatttgattgtttcgaggtctgtcgcttgggaggttgatctttgttccattgagcagagaatctccggcaaagatgcaactgacgtctcttctaagaaaaaaaataatggcctctttggaatggccatcctaatgatcacatgtttctcttttggatgatgtctcatggagttttgtatatgggggactgggaagtaaggttatttgtgttcgatgtttgtttgatctatatgtatgtattatgacttcgtcatttgcttagtgctgtctataccccaccactgtttgttgtggacaatagcaacttgtttctactaggacttgcatatagtgattctctcaaagtaactctttacctattcgaggagtggtacgtaaagtatattcgtatatatttatccattttgatcatgatctcatctctcataggaagggttgcgtattgacatccaaacgagcacaacatatatagacaggactatttgccagccaccttgttgcgatttctagtgacgcttgtaggcacgaacttcagagcagacatagacttttccaggtcatcaatgtccatatccatgtcatttggtggtttattttcagggatagctgctgccggtgggttcgattgagacgccgagcttcggcgccgcaacctgccctccagagccgacgacgttgagagacgtcgtctgtggctgttcatgggccgcagcatagatgtttgcttatcgatgccgtcattgacaatgtagaagttgtaactctgtataatgtgtcagtgacgtaggggcgctattttgatctgaaactcacccggggaaacatgtgtttgtcgataagatgtagccgtcgtttctgcggggttgagcatttccgctcgcagtcttcgatgaagcacccatactttggtttgatttagtaacgtgggggtatagttaaggaggtaggctagggcttacggtcttgtctccacgggcccgccgcgcagcagctagcgggtcatggttctcctcgatgtgtatgttgagcaaatggccagtagggaagttcttgctgcacttggaacagcggttgacatgggattgaagataatggacctcgtagtcgtcgtaggaggtgaacgagagcgtctcgcggtgaggcggtaaggagcaatgcatcacctcagggagaaggaggttggtatcactgtcgatgagcttgttgcgctcagatggaggagtcgtagtattcactgcgattgaggatactgatattgagtcttgatcgagagatggagatctcgagcggcttcggggtcgtttcgacatggtctaattcgccttgcatattattgataggtcaacttggcgagcgtacggaggagtacagcgaccatgcaagacttaatttattcactctccgccttgtaatctttttagaagtctttttatatgcttttcttctgaagatgtcttcttcctcttcttaagctttctggatagatggcagaaaaaggcgggaagggcttatataaattttgatgagcggcgccggcgggttcatatagcgatttgatatcttattgactctacaacatagcaagctacttataggctacgcctctaggatttaagccaagtgtttatgtgtagtattccttaacaatgtgtgttttactttccatcatgttctcctctttttctttagatgtctcttgcctaagggttcgggcaaatgttatagaaagtacgtcaacagtatgatatcaacatctcgtaccaaaaagctcaatagaactagttaaaccagtttattctgaaaacatcggcggacggcaaaaatacctagttaggtcttttccatagatgctataaccctccgcgcgtagtggagcacagtgatctgttaaagacggtataaacctcttcgctagtatacattgagacaatcctcatcttcaccttcctttgacttgcacatgtcgctgtccttatgtcgctgtgcccatgagatgaaataaacccgtaatcagcatacgttacgcgatacctcccgccttggcaacaccaatcatcgcggatagtagaccgagatcgcatttatgcattttcatactcaactcgaatcacatcatccctgtgcgctttcatgtctttcacatactgatggctcctccgccgttcatattccaagccatagccatctgaccggcgaggttgacgctcgggatccccgggctaacttcctgatggcgccctcgttcacggatgcctggaagttagtgctttcccctctcgatttcggctggattgtgaacattgaccagtggtgtgatacaggactgcaatagaagccgagaaagagcttctgcaatgcttctcgcaagaacggcgcacattcgatgaattcgaacatttcctctccgagtcagtgacaagccccgcgcgcacgccaacgcatggctgacctctttcctatataggttccgaacctcttctcagaatgcaatcctcctcgatttcaatgcttcccgcgaggccgatgtggagactcgcctttgggatgcgcacttgaaagtgaacaatcggtttcgcaagcagttgattcgcgtgagtaccccacggaagcttttcgcaaagtatatattcgctgactgtggttgtctatcattagtttcgcgaagagcacggcaagaaaaaaccagtggagaggcggaaactcgaacgccattatctcgatttcattaagtcaagccagcggttttaccgaggatacatccagcacttgtcgtcgcgatttggggggattgttgagttggagagagtggcgcgcaagttcaattttgagagtaaggcagatacacaagctgcgcgccgggtctctaggcacgctgacccgcgtttgtttttagatctgtccggccaacctcctatcaagccctccaaagacctgcgtaggctgattctccagtcttgccacgcaactcttatccggctgggagacctttcccgctatcgtgaatcggaactcgtcagcaaagatcgcaactggggccctgccatcggttattatgatttggcgtcggtgatcaaccctgcttcgggtgcatctcagaaccaattggcaattatcgctctcgcggatggaaatcatcttcgtgctacctaccatctctacagagccctgtcagcccaagaaccccatcctactgcgaagggcaatctggagattgaactccgaaaaatcatgagtgcttgggctaagaaagagctgatccgccccgaagatgccggtatccctggaagggccttgacctcgtggtttctttatctccatgccaaatgttacaagggcaccgacttccccgagcacgatgagttggagagtgaagttctcagtcaactagcagtagagattagagaacgatcactagaggggacacttcaaaagttctgtctcattaatattgcggccgaggattttgctaaggtccggtctattggtaagagctcgaaacattatcattgctcatacatctgcttacttatcttagaagagtctgtcttagaagcacgcgtctttttccaacgcatcaacgtgaagacatttttcaccttactgcaaatacttttggtcgaactcgaacgaactgcttcttttgaagatccgaacagcaaagatgaaatgcctatcccagacaaggtgtccgtggttgctcgtcggatcctgcccgcgcttcgccattacagctcctggctgcttacaaatagcaagtctctggttgagcagaaggaggaaaaagattcggcgctctcgattcaaatcaaagagttctggaaaatctatgccggtacgctgagcctgctcgcatcctcgtttgatgtggtcagccttcccgaggtcgattatctattggaagaagacgaagaaagtcttggttttgcacctctagatcaggatgccacttctcgccgatacgttggaagtcgtgatcagccaaagcccaggatgcacgatcttgggattgaaagaagtcaccccaacatggaaatgctctatcgaattcgtgaattcgtgattgatggactcgacttggttgttaacggagtatgtggaaagctctgaagatattataaacaaacaagcagattgctaacctcgtttagaaaatacccgtggctcttgtggacagtgaagacaagaagacatttatctatcaagaagaggatctgccttcgcaattctattccagccctcatggccgccagaatgcacttccggttgcgagcatcgagcgtgaggatatcccacaggccggtcaaaatgcatactctgccgcagaagcccaaagtctgttcggcggttcccagtctgcatcggcatctatgtccgccaacatgcatcagatcgttgagggcgttgaacgacttgttgactcggacacgtatgaaaccccatccaatggccaatttgctttcatgaattcgggggagatatcgacacctacgcatgtctcacccaatgtcaatgcttacccgttccggaacgaaaactctccaccactcaccactcccatggctcctccacctgggcttggtccaccagtcataaatacagctgagcctacatcggcgcaatcatataccccacggcctgccattcccagcatccctagcatttggacaccactgagagacaccgcccctccacgaacgccccctggccttggtccacaacatggccagcgagctccactgcaccccatggcttctggaaatgccatgccttctgagcgctcgccgtcgcaagatcagttagcaaatgagctcatgctccgacagcacttgatggcccagacccagttttcaagctcactggacgtaggatcaatgcccacaccgtgggcatcatccatctctcatgctcgtcccaccgccagcggttgggatcatggccgagcgaccttcggtgcattcgaactcccgagccagacgatgtccagcagcctgggacatcagtcatgggccaatgacgctttcatcgccagcagcctcgctggggcaactccctacagctccgggattggcgggcgcaagcctgcaacccagcttggagcagtcggtcaaaccccaccctgtggccaaggaggctgattcgaatattaaagctctcattttttagttcttctatgtgcatatgcatattacactaccagctgggcaagctgtcataattaacagtgctacccgacctccaaatatcctggcgtgtactgtgtttgtctgtggtcactgagtctacaagttcaggcctacactgacagtatgcacctttacaacgaccagacgagattgtattactgctagccagtttcacaaatggcagatcccgcactagtcctctggtggcgaggacgcttatggctttttttccacaattgcaggaacttcttcggtcctcgctctcctcgcaattttgtctggacggatacgtgcgttcaaccacaggacatgatcaatacgaggatatgaacatggacaatctgccattggagaagacatttgtttcgttctgttttctgccttttcttctttttcatgcaacatggccaggaaccgcgttatccccatcaaccttagcctcgtcttttctatcgttagaagaattctagggcgcggacatacggtgatctttgaaattagtatgggcctgcagattactcggggcctattaccctcttgacaccatcgtgtcggttaggcaattgaaattcaaatttgcattttacgtgcttcttgtagtatctacggtatgggctctttcttgcggataatagaagggtagatcgcctaaatactttcatttatcaggtggccgttacaaggacagccacaggtaattagacaagattctcaaaagtatgggttttgttcgctttttcagacagtacgttgaagtcatgaaattttaagaaagggaaaaaattgggtatagagggttgaatcatccaaagtcaagtggtgctcatccagttgttgaactggatcgcacaaaaccttccaattaggttggtagatatgttgaaggtgttggtagtctatgctttttttcgtagcctacattatgaacgcttaggagcgggagtaggtctgcttgggggaggggaagctgcgagttaagagttgttagctagtgttcttgcaatgtattactttgggaaaactcacgaaggtccaagctcctggatgctcttgctggcgagccactggcccatgtcgatgctgtcatcgagggacttgcccgcgacgataccagcgcagaaaccaccggcgaaggcatcactataaggaatagcaagtcagtatatatgagtggattgttcagatcaatatcactcacccagcaccgttggtgtcgttgatggcctccttggagatttcgcggaccttgaactccttcacctcgacgtcaccggtagcagagccgatggcgacaatggtggggagagtgccctgagtgacaatggcaacacggggacgttgggtgttcttcttggggagctgagcgagcttcttggcgatctcagtgatatcctcggtgccccactggtggccctcggagtaggcaatggcctcagtctcgttgcagaaggtgtagtcagtgtagggcaggacgctatccagctggtccttgaagaactgagcaatgaaaggggcagagagagacagcatgaaggtctgacgaaaataaatagattagaaaaaaggtccaatgcagcagaatgcaaacgacataccttgttcttagcggcagcctcctcaccaagggcaaggatggcgggaacacagacagtcaggtggtagccaccgacgtagtaatgctgggccttctcgaccagagaccaaacctcgggctgcttgaggtgctcaagcttgtactcgttggcagcagcgaggtgggtgcacatgctgcggtcgtggccagtgatgacaacaccacacttaccggtgggctgggtctcgtcgatacggtactcggtgtggacaccggcctcctcgcaagtcttcttgaggatctcaccgtacttgtccttaccgatacaaccgatgtagacaacggagttctcagggagcatgtactgagaaaattgtcaatatcaatcatggggatcacgagggtgttttaatccatacctgggcaccacgagcggtgttctgggcagcaccaccggggatcagcttggcatcgcgggcaagcaggtcctcgtagatacccatgtgcttctcctcggcgaggatagcatcattgggcttcagatcatacttctccaggagagcggcatcgctaagaaatatcagcatttagaacttagcaccattttacttcaggttcattcatacccacgagcctggatgtctgttgcaagcaagtcagcattttataaacatgtccagatgatccttcacataccgaggagagggttctccagacacagaagagggtaaccttgagcagcagccattgtgatataattaatgagagattaaagagaattgagaatggaatcgaagtaaaaaggtgggagaagggtgggaggatgtggaggatatggaggggctggcagaaaagagcggactgcgtatccgcggtcccaccggtaccagccgaacaaccttgggagctacttctattcaccccaggctgctcaccttcgtataaaaacccaccaaaatggccgaccatgctatggatatcccgcagattctccaatccgcgagcatcaatcgcaatccagacccatctcttgacatcaatccagccaccacagcttcggagaaacgacccgtcgcggtaggcccagactccgaaacaaacagcattgcctccgacgttgtccatccaagacaagtaattcggccggtccgccgccgacacactcttcctcctcttccggatctgcgctttgagcagagctatctagccagcattaaggatgctgacacctggggccgagtagcgtggattactactagggatcaggtatgcatcaaatgattcctttggggtgtcaaggataatctctttgataatgcctggctaacatgtcaatctttccattctaggtacttctccctctgatccaaggaaccgtttggacactcgcgctctccggctggcgtttctggaaccgcaatgcttcagtcagcggacacaccctcggcagtcgtgttcgcagatggtggtacgaagtgaacaactggcatctgccgcaattgggctcgaccagagatcataagcaaatgtcgcaggttgaaaatgtgagtacccacttcgccaaacataaatttctcatctgatctcgaccagaagtggagaggctgacgctcgaggagtttctgcagttttacacagcccagttctccgatgcaggctctaactgaggtcacttctgcgctggatgcgacctgtctagtgtacactgtattgcttgcatttttggcgtttgcgctgttgggggcgcctgcttttgttgattcccatttcttatatacctcgactctactatatagtagattaccttttttttgccatatctggcgtaccgggcaaacctcatgggctgccgcgtcagaacacaacatttgcgttgtcagttggcataaatctgtatacatagatctcgagtacgtgccattcgaatttagtgttgtctactgtgtagtgaacttattgattatgagcaagacaatattttgagcttcattccatcacttcgcgtgccgtttgtaccgatataatacacacagcctgatagaagtacaattgcaatccaaaaagatctatctagtgacatttcgtagaatatatattcctggcctctttctagtccgactaaagcgaaaacacctattctgaagtgaatccgaatttatagctagatggttcaaatttgatccacgccgtttgaagaaacggatggcgcagctaccgctgcagcagaatgagtcggtacttggggtatcgaagcaaaagggtgtgaagtggcaatcattgtcggggcttgctgcgcatccgagtttgattgatggagggtcttcggcggtgcttgggcggaggatgctgctgcggtttcttcggcaatttcgacttctttcgccggaggtgattttttgatctggacctctagattgctaggtgcatctcccttgccatatcgaagttgcacaacaaggctttctggctcctcattgccgcttgactcatctgcgcttgcttcgtcctcttcattatcgccttcgacatcgtgctccaaatcgtcttcaacgccttgccattcgttgccgctttcattcgcgcttgaaggaacttcagatgcatcctccaaatcatcggcgtcgtatccagagtatccgttggggtgggttgaagtgcgagccctttggggtctgattacttcttcttcatcatcttcatcaaactcatcatcatcagctccgttgcgttgaccaatcaacagagcctcgccatagaggcccccggcgcgagatcgaatctgtctcccgcttgccgtgaaccgagggcgtctagactccgtggaagcttccgtaggagctgcatttctagtggagcggcgagcggaaggctcatcatcatcagaaaagatgtcatcgtcgtccgagtatgtgtatttcagtttcttgccgcgtgtacgaccttcatacatggagaacccaggatccggacgaacgaacgcagctttccgagcgagacggtattcgcggcgtctccgtttctaataatttattagcaaaatccaatgtactctctaggtagaaaatcacctcttctgatgcctcaaatcgagggattgaagcgcgaattctctcgctaagcttcttggagtttgtgcctttttcgccctcgagtttctccacgacagcctccagctcaggaatactccccgcgatgctccaccaagtgttgtttttgagggccgggttactttcgcggtaaaggcggaaatttgtatcatcatgcccttcgataagccaataacggcgtttcaggctatctctgccccagggttggacagacaatggttgattgagatcatcatcgtggcgcgcctgcttgtaggattctttaatcttcgcctgaaccgcttcggacgacgaaagtgaccacagtatcaaggttcgcaataaacgcagctaagagaagacatgtcagaatcgccaatcgggtgtcgtggctattaaaaaacatacacgttccacgggtgacatggtcgcaaagctgccacccccatgaagagggtttttgccctcccattcttttggccactgcgcctgatgtgtatggattgcttcttcgaggggacgcgtgaagtgatttcgtctgtatattcaaatattagataagcacttgacttggcttgacaaccgatagcgtgcgcgtcttcaagcactccgcacggtatcgggcgacaggtggcgaacatactcaacttctttcttgcggttcagaacaagcccaagcaatgcgcatagaagtctttcgatgtattctccggggggcgactcctcaatgcccttctcaatatcctgtgggccgtagtgtggcacacctttggggaacacttcatggaaacgcgcgcggaacgcgacgatgaactaaagattgcgataacttagcaagcgtgttctattgttggccaaacgcgtcatttgtccgtagaccaagcaatgcgcaaatcttcctgccaaatagactcactgcaatatcggggttgtcggccacgacgtattcatgcggaggtgacggttcccgcttcggtggcggcgtctcagactccttcttgaagtactttgctataccagtcgggtggtcaatcgccatagtagcttcgtcatccgttggaggtgccgatgataatgatgaaagttctgaatctgaaggcatggtggaagtgatggggtaggtggaaggaagaagtaagttgcgcgcaatcgagccgtcacgtctgcacgtacggcaggtttttgggtccatcgcgccaacctatgtgcaagcctttataagcaggagattatttctctattttagagcacatttgtgcaaactcgatacatgccctactctaaaatacctataatatctaactatatcccgtagagaaagtctagcgctataaaaaccactttgttatcatctttctatcgctattctagggctttttagaatatagccactgactatccccgaatattgttagtaggagacatttgatacgaactatttctagacttttaagagaatacacttatgtatcaatgttgattcatggcagccggttaaccttcctagcgcgatggacacaaaaacctgccgtatgcactgggcttgcgcccgaggctattatctcaaggattccggagacaactgctccatttgtttgtaacatattttaccgaggctccttattgtcttctgtaagagaatgaatcaaataaatgagatattggcataaaagcagcttgaatttgcaaattactgtatagaagtagagctgagctgagagactggtgaagctctatttggtattttcaaaaccccaatcaagtcaaagagatgtaatagcgcagggagaaatgaatgtgactagctgggacgaattcacatatctgttgctttcatactagacctcgagaagtacgcgacgagctttgtgaaccattggatattgacatctgtaatgtttgagaggcaagtatggcccaaggctgtttaggcctcatttaattaataggtccacacaccaaaaccatagacagaagcatagaatatacagacacaggtgtttcgaggtccaaggaagagagcaacactccaaaatgaaaagtcttggcgatatctagtcttggcaatcacgtgtgtgctgatgacataacctgccctctcaaaatctacagggcttgcactgaaagagtctcttcaggcgtcaaatggagattatacagagatatttcagtcgaaagcctttcaaaatactctttttaatttagtaatgcaattattatctataatcaccatataaacctagcggttaaaggcctatttcagaaatgctgtagttcaagccaattcaagtaagcgaccatgcgctatacccgattgggttagattagcgaccgcaccctaaagcccacacaagtccccgtgtccgatgatttctcaactcgtcaacgacaagcctatttcacttcgaggtacgcttaccacttttccacgacacttctgtccggcttccatactaacataggatcctcgtctagacagtcgccatgggtcgtgtcatccgcaaccagaggaagggccgtggctccattttcagtgagtgcgaccgcaaaccattcccgcacgaaattttgaggctgcgcatcccgagcagcgaggaggaaatgaagaataccattggaagaccacacagattcgcaaggagattggagtgctgattacgaatttttctctactttacagcggccaacacccgcctgaacaaggcccctgcccaattccggaccctcgacttcgctgaggctcacggttacacccgtggtgtcgtcaaggagatcatccacgatgccggtcgtggtgctcccctcgccaaggtccagttccgccacccctacaagttcaagatggtcaccgagactttcatcgccaacgagggcatgtacaccggccagttcatctacgccggtaagaacgctgccctgaccgtcggcaacgtcctccctctcggctccatgcccgagggtaccgtcgtctccaacgtcgaggagaaggctggtgaccgtggtgcgcttggccgtacctccggtaactacgttaccattattggccacaaccccgaggatggcaagacccgtgtcaagctcccctccggtgccaagaaggtcatcaagaacaccgcccgcggtatggttggtatcgttgccggtggtggccgtaccgacaagcctttgctcaaggccggtcgtgccaagcacaagttcgccgtcaagcgcaactcttggcccaagactcgtggtgttgccatgaaccccgtcgatcacgtaagtttccgtctatacacagatccgataacatccaggaccgcaatctctaacatctctctctacagccccacggtggtggtaaccaccagcacatcggtaaggcctcgaccatctcccgctacgctacccagggtcaaaaggctggtctcattgccgcccgcagaactggtctgctccgcggtacccagaagaccaaggattaagggtgctttttcttggagttattcttgtgacgggttgaaaatggaattctgctatgagacaaatgtacttaggcgcctgcggatgagcgtctcatgcgcccttagcgaattaagcttgtggtcaccatcctttttcttgtcgaacaaatcaaagggtgatgggaaggggtccggggttggcctctacagggcagaaacgaaatcaaaaagtcctccgggctgtggaatgatacacctttaaatttttactcgttcctatccatcaccttagtagatattacagtctagtaattcatcggcatatacatttcgatgcatgatcgttgtcactattgccagtgccatacagtggtgaaacctagcgttccacagaaaggtttgcatcacttgttgtgttatggtcctatggatgtatatatttagctctcaacgttgaccatgtatatatatgaacctagcacatatctcagcaatgtagtctaaccagaaatacaaggcatcatgaggttgggcccataattaccagcccaaacgaggttagaagcattatatatagtccgttatgctcgttgatatgtatctcgtgattctacacaacagatgtgcaatcggaagcccagatccctgtattatatgcctttgtttcttgcaaactgcctactataataaaaaaaggcatagctctggtgtaatcgatttgggaagtcaactgtgtctgtcgtaggttgacgacgtacacgcagatcaatgtgtactacgccaatctatccaattctgcccccctttcttcctctcccccaaaccccactcaattctataacagtaatttacttccatgaattggaagataaatcacagcattctcaccatgtcatccccacttgatgaaaatgccatgaaccagctacagtctgaacagtcagaactgctggacaagattgacgagctgcgcgccatcggagttggaggccttgtggagctgcctcaaatcatcgtctgcggcaatcagtccagtggaaaaagctctgtattggaggccatctccagagtgcgctttccatccaagagcaatatctgcacgcggttcgcgaccgaaattgttcttcgccgaagccctcacgacaggattaaagtatccatcgagcctggggattctagggagaatgagcaggaacgacagaagcttcgagccttcacctccgaggccttttcctctagtggggacctccccacactgatcgaaaaagcgaaggaatgcatgggcctttccagcgccgatccttcgagcgttggatttagcgacgatgtcctcaaagtcgagatctcgggccctgaaaagccagagttaactctagtggatctcccggggctctactactccagcagcagcgaacaaaccgagcaaggaatggtgatagtccagaaactgacggaaaagtacatgaaaagctcccggagcatcatcctggctgtcatcagtgcaagggccgattatcatatccaaaaggtcttgaacatcgcacagacctttgaccccaaatatgagagggtcttgggcattgtgacgcagcccgatatccccgaagcgggctcggaggaacaagaaacttatatacagttcatcaaaaacgaaaaagtcaagctgcaacttggatggcatgtactgcgcaaccgctcgtttgaaacgtgcagcatttccgatgacgctcgagacgctcaagaaaaggatttctttgaaaagggacggtgggcttcccttcctcgagatcaagtcgggatcgaaagtctgaggcatcgcctcagcaagattctacttggtcatgtccgtcgcaatcttcctggtcttattgcggacatacaagagaggatttctcataacgagcagacactagcaaaaatgggcacgccgcgcactactcttcaggagcaacgccgtttccttgttgatatcagcagcaaattcgcgcgaattacagaccaggctttgaatggatcgtacgtcgatgagtttttcggtggattccaagatcatacggcgaccacaaaagagtctcctttccgccgactgcgggcagtaatccgtgagcttaacgagtgctttgctgaagcgatgagcattcgcgggaaccggcgaatcatccaattccctggacagtcaacacctgttgagaatgtcgagcaagagagatccaagccttatatgagtgattggacaccgcagtacatttcccaggagtctcttgtggatgagatcaaggaacaggcccgacagagtaggggaattgagctaccaggtagtgcgaaccagctacttgtggggagtttgttccgagaccaatgcgagccctgggaagcagttgctaaatctcatctgttgaatacctgggattcggtcgaatactttatccagttggtcctgaagaacctcatggacgatcagacccgcccgttgcttatgcgacacctcatcggaccggaaatggagaagatgaaggagtctttgttggaaaagctcagcgaattgacctcgtactataaaaggggccatccgttgcctgtagggacatcatttatctccaagatccaggagtccagaaagaaccgccagattgctgcgttgaaaaagaacctccagcggtctgaatttgccccgacgggagtggatactttcaatgtccgagatctagagcgagcgacatctcagctacagtcatccagcgatcagtttgcagcagcagagattattgaccaaatgcaggcctactacgaggtgagctagacgtcgaaatgagatatcgggtagttctaacaggccgtatttgcagactgcgatcgtgacattcgtcgacaatgttgccatcttggctatcgaaaattgccttctttgccctttggagcatatctttaccggcaagactgtacttgaaatgaatgatgagcagattcgacaaattgcaggagagccatcgaacatccagaaggatcgggaacgtctgaatgaagagctcgaaaagctccgaaagggaaggcagactctcaatgccttcgttatagcggactcttcgctgcgtgctcgtcctatcttgggtacttacattccatataccggtacatggaatcacaggctaaccgaaatatcatctcagcaggaccgccaaatccccgagctagaactccaagccgtgcaggcacggctccgatagctcaggtggcgcccaatactcgtctgttctcgcgagtttcacctgctgtcactggtaagtagctcttcaaataccacgtcgatatgtaaaagctaattttcaagcagtccctgctgtgtcttctcttcctgtcgtgtctcttcctgtcgcgtctcctctccccatccttccttcaagtcaaggaatctctgatacagctcagggttctttattccgaaatccagggaatggcggatctttattccgagacccagggaatggcgagtctttattcacaggctcattgaatagcggatctttattcacaggctcattgaatggcggatctagacctaacaatggagccaccaccacgctgggttcattcggtttgtcacccggtacaacatcggccaccgggaatgtgtctagcccaacggtcaatgggacgtttggttcgaataaccaaggctctaattctggctcgtcgtccgctcctttcggaagttcgaccagcccaactcccttgtggaaacctctctttaacgcgacgacagctccaagcaccttgggatacaaaccagcgtaagttataggatgcgcgggacgggtccattctaattattggtcaccttgtataggtatcaggagagagagcgcgactcaaatacaatgaactattaccaaacccttggcgttatgcttccattttctagctactcctttgaggtgtgtagatcctttgagtcccttgagatatagtcaacacttagtactatatgtgaagaaggaaagatattgacatgaacttggttaggagcttcgactcggagactacgcgcgaatggacaaatatctctcgactttgccattggctcgttgagacagaatctatggtaccttcaattgttgttggagtggtgtgtatagtcatggcaaagttgcacaggaaccgaagattattcggaaccaggaaggcaaaatacaacatttagcataccaagtaaattattcaatcctacatgtacatgctatatattgtaggtagccctggtgtactaagtacaccgttgtacattgaggcattgggtagtctggacgctgattggtcactttggggtcaaaccatcgcctaggcagatttcccgaagttccctctacctggagtaatttgatgccacaatgaatacaatatacaatatctcgaagatatctatagtatgaatacccggaaaatgacagacccatccaagccccagcagatcccccgactcaacccgaatcccctcaccaacccggaacggtggcaagccatcgcaacccgcgacataaccgccaacagcttcgtctacggcgtcctgacgacaaaaatctactgtcgtccctcctgcccagcacgactagcccgccgcgccaacgtccagttctatgacaccgccccgcaagcagagaatgccggcttccgaccctgcaagcgctgccggccgcattcgggccagacggcggctcaaagcaaccctcaaaccgccaaaattgacacagcctgcgagtcaatccggagcatcctgacagcaggactgaaaccgaaattaagagatctggcggccgaggctggcttgacgcctagtcatttccaccgtgtgtttaagaagcacgtgggcgttacgcccggtcaatatgtagagagtcttgggcaaagccacctgcactcaccggaatcatcgccatcctgtgcttttcctgaaggtggaacgccgcgctcggcgttgggggataggggtggtgaggtgttggatctagattggaatactagtgagaagggggctggtctgtcggttgctaggggcaattttccatttcccagtggctggaatgaattcgatgctctgctggcatctgaatcggaacagacgtggatacctggcttatctattgaccctcgaatgaccttggcggatgtttctgatcggaccatatgattacgatatggatacttgcactggagacgagtatatatattcctaccaataataacggaccgaatggtggatgggaattttcgccattttactccgtcggatttgacatgcaacttgttgtattgtggcgatgcaacccactgatagtcgttggatcttgattcactgttcaccgtaactcgcaaatcacattggaccggtccagagccagggaccaactgaaacagttttgaaacctttttttaaagccaacgcatgcaccgtgcgagtattatacgagtaatacggagtatgtatatggagtgcatagtttagtacggagtctatccaaggttattgtatactattgggctccatataataaggataataaactagtagttcactaatgccactactttataagtcacattctaatattccctggtggcaagggataattatagtaattcaacgcctccaatgggatttagtggctctccaccagttggtccactaacgcgtgtcacagcgtttactgggggtggttctccccttggtggcaggctattttagggctttgtatggggatacgccggtacagagcacggagtactacggagtaccttcggacgcaatatgactgtcgcattagggacttggtagttatggacatttcgttatttcgttatttattcttcttcttattcgtttcttgcttcaatggcaataataagagagtacaggcttccccactgattgacaagatcggcgttactgcatgcataaaaagcattgtattttgttgtaacttgtatgcgaatattcgattttatcataattgcgtgcccccccggcatttaatctaattcccaacctcctttcccctccccctcccccgtcttttctcctgatcctagagcattctagacattcccttaccactcccttaccattcccttccaaggttgaccttttattctacacaatcgctggtttcgattattcttccgcataccattatctctcgccaacatgcacgtcaacaagagaatcggcagattcaaacaatgggctggagaacgcatgggcggggaggccaagacctgcctgtctgatgatttcaaggcaatggagacggagatgggcgtgcgacaggaaggtaagaagtggccacactccgtgcctgcagtgtatccatactgacaaccgctctctatctctaggcgttgagcgcattcataaatccatgacctcctatgtcaaggctatctccaagcgcaatgagggtgacgacaaagaaaagaccctcccgattgcccacctgggaagcagcatggtggcccacggcgaagatttcgatgggaactcggaatacggacagtgtctgatcagtaagttctgaagacgacctggggaatgcggcgaaaaaaatcgaatccctaacaattcgatcagtgtttggacgcaccgaggagcgtattgcgcgcatccaagagaattacattgcacaggcgacttcaagctggcttgagtccttggaaagatccctgactcagatgaaagacctgcaggtatgtttttggaccgaaggttaaagttgaaagtcaatattaacctgctcatagcatgctcgcaagaagctcgacagccgccgactggcatacgatacttctctttctaagatggagaaggcgaagaaggaggacttccgcgtggaggaagaactacgctcccaaaaagtgaagtacgaggaagctagcgacgatgtgctgcgtcgcatgcaggacatcaaagaagccgaagtggacaatgttatggacatgggggtgttcttggacgcccagcttgactaccatgaacgatcccgcgaagcccttttgcagctcaagaatgaatggattgggtaagcattgatctagcctttgcatcctcgtgtgcggtactaatactgaaacagggacagccaattacagccccctccccgtcggccaacccgtcctcgtgccaacactgcccactcgttccaggaacggtatgagccgctgcaggaggagtcgattaatgagactcgtgctcctattagaccagccagatctattacaccatactctgactcgcccccgcgagatgcctatgggaatgccagtgtctcgcgtcccgttctcaaccgaattcctacatttgaaggcccgtctcaactgcgacaagaacaagcgccagttgcatcacagtggctccagcagcgaaccaccagcgagaatctgggcgggtttggacgtcgaagcagcacccaagttgggaacggtcgagtctctgctgatccttacgccgactccgaagaggtcagctcatatggccgttctagccccgagcggatatttagcgggggcaggtccatatccccagcaacatctcacggcagtacgccatcccggagacctagcgcaaccaacttgaacactctcggatcgaagaaggctcctccgccccctccaccatctcgtgcgaagaagccccctccccctccacccaccaagcggacccttcttgcggcaccaaatgcgtaagaacgctctgaactttgaagtgcatctcacgtctgttcttgatcttgagcatggggttttggagtttgggagctataggttgtggcggtatctattcttatcattccgtcacggatgccttgagtgttacaggattgttctgtcctttccttgattgttctttctagtttgcttttcccatgattcccatggaggtctggaggattccccggctgctattagtctcaacgcagagttagtaggttgatgataaaagtggatacctgcgtcttctaagaataggtagcgaataggcaaatccattcaagtctttgttcatttataatgatgatcttcgatcgtgtcgatacccgttgacagccagggtggacccggtatgtctggctttacaatgtattgtcatttttattggtcattgaaatgaagacaattcaaccgattcaccctcattccatacacccaatgtccgatcataaaaccaatcctcttcttttataaccacctcccatagtagccctgatatcccaaaccggcacggtaccagagctgcgctgccccaagccacaattcagcacggggtcacgtgcctgctgactaacgtccgttgaaaaaactccttgccaggctgttgtcagtcctttgctctgagcacccagatttccccgagcctgtcgcgcaactccgttccctccccatctccattttcatccatccactttttgaacgcgccatcccaacgcgccttcaacttttgagcttcccttccaccttgccttaccctgggaatccgcctctttactcgctttctttgactcccttgtccctgaagtacccgacccccccccatcgcatcggaagctccgaccacggccccaaacatcacgtctgccatcgccaagcatcgcatacagtcgctcactgatcgcattcacccataattaggcctcccccacactgtcgccgcctctttatttcgaccacgatcgccacttctctcttgcccgcgcgatttggtaattgggaccaggtggagactgtgacttgccacaactccgcatcgactttgatattgctcaccctagatcacgtcgcttgctgatgaattaaaaaaatacacgcgttacgatggcttccttacacccagcgccaaacatggcgcctggcaacgtgagcttgccgtctaacctcacgcagcaaaatgtccaggagatactccaggtaagtttgtcgcattacaactacacaactcgttatatatcaattcgttattccctcgacgcgccttcctattacatgccgtctctaacgttatcgcagaaatacaagcaaatgcaagaacagggtgttcgccctgatgacccggaattcctcaaggctcacaacctacttgctgctattcaacggcaacaggctttccagaaacaacagcgcatggctcagcagcagcgccaacagcagcagatgaatggcgctactcctgaagctgccaatggctctcatggtaagttttgtcttcacctccaaatccaaggtcttctacagggttgacacatattcttacaggtcgcacgccctcgacttcctcgattgccgcacctaatgccccgaatgcctcggcggttgcccagaataagaatgcgacggttggcagcggtagcttttcaccagagcaactgtctactcttagaaaccaaatcttggctttcaagatgctgtctaagaacctcgccattcccccgcgtgttcaagaacagcttttccaaaaccagaagaagtcccaaccgcctactcctacagaaaatgttgctacagccgaaaaggtcattgaagctgccaatgacggcgctggtagccagcctgcagatagctcagatgccgaagtcctgactagggagtggtatgacgacttccagtctccatatgactcgctctcccagactattagctatactgaccacgccaaccgcgcaaaccgtgtacgcattcccgctcttttgccacctggcatcgacttggagcagatgcgcgaggatcgtgaggtcatactgtataataaaatcaccgcccgcaaagcagagcttgcccaacttcccgccaacctcggtgtatgggataccagcaaaagtgacgcaccaacatacgatgactccctcaagctgaaggccctgattgaatacaaatcacttaatcttctacccaagcagcgactgtaccggaagcagctccagagcgagatgttccactacagtaacctcggaatgacagccaatcgctcaagtcaccgccggatgaagaagcagtccctgcgtgaggcccgtatcactgagaagcttgagaagcaacaacgtgatgctcgcgaatctcgagagaagaagaagcaatacgatcagctgcaagccattctcaaccacagcgctgatcttgccaatgcttctctccagcaacgtacgcgctcgcagaagctgggtcgtatgatgatctcgcaccaccagcacatggaacgtgaagagcagaggcgcgtggagcgaaccgctaagcagcgtctgcaggctttgaaggccaacgatgaggagacatacttgaagcttttgggacaggctaaggattcacgtatctctcatcttctcaagcagaccgataatttcctcaagcagcttgctgcatccgtcaaggaacaacagcgcaatctggcgaatcgttatggcgaagcgcatgattacgatgacgagtctgatcaagagatcgcggatagcgaaaacgaggatgacaatcacaccgccactggaaagaagaaggtcgactactacgctgttgctcaccgcatcaatgaagaagttacttcgcagcctgacatgctcgtgggaggtactcttaaggagtatcagattaagggcctgcaatggatgatttcactgtacaacaataacctgaacggtattttggctgacgagatgggtcttggaaagacgatccagacgatcagtttgattacccacatcattgaaaagaagaagaacaatggacctttcctggtcattgttccactgtccacgctcactaattggaacaacgagttcgataagtgggcgcccagtgtgagcaaggttgtctacaagggcccgcctaatgcgagaaagcagcaacagcaacagattcgctggggtaacttccaggttcttctcaccacctatgagtacatcatcaaggatcgtccggttctcagcaagatcaagtggacacacatgattgtcgatgaaggtcaccgcatgaagaacacacagtccaagctcagcagcactctctcaacctactacaccagtcgataccgtatcattctgactggtactcccctgcaaaacaacttgcccgaactatgggctcttctcaacttcgtccttcccaacattttcaagtctgtcaagtcgtttgacgaatggttcaacacacctttcgcaaatactggtggccaggaccgtatggatctgagcgaagaagaacaacttctcgttattcgtcgtcttcacaaggttcttcggccattccttctcagacgtttgaagaaggatgtcgagaaagatttgcctgacaagcaggagcgcgtcatcaaatgccgattctccgccttgcaggccaagttgtacaagcaacttgttacgcacaacaagatggctgtcactgatggcaagggcggaaagactggaatgcgtggtctcagcaacatgcttatgcagttgcgaaagctctgcaaccatcctttcgtctttgagcctgttgaggaccaaatgaaccccactcgcatgtccaatgaccttctttggcgtacagcaggaaagtttgagctgctcgatcgtgttctgcccaagttccgtgcgactggccacagagtcttgatgttcttccagatgactcagatcatgaacatcatggaggatttcctccgccttcgtgggatgaaatatctccgtctggatggatccaccaagtctgacgatcgatcggacctcctgaagcagttcaacgctcctggatctgaatatttctgcttcttgctttctacccgtgcaggtggtcttggtctcaacctgcagactgcagacaccgttattatctacgattcggattggaatcctcaccaggatttgcaagcccaggatcgtgcccatcgtattggtcagaagaacgaggtccgcattttgcgacttatcagttctaactcggtcgaagaaaagattctcgagcgtgcccagttcaagctggacatggatggcaaggttattcaggccggaaagttcgataataagtccactaatgaagagcgagatgcacttcttcgaactctcctggacacggcagaagctgcggaacagatcggtgatcacgacgaaatggatgatgacgaactgaatgaaattatggcacgatcggaagaagaaattcccatcttccaggagatggacaggcagcgaatcgccaacgatcaatatggtcctggccaccgctaccctcgactgatgtccgaacaagaattgcccgaaatttacatgcaggaggataaccctgtcactgaagaagtcgaggttgaggtcactggccgtggtgctcgtgagcgtaaggtgaccaagtatgacgacggtctcaccgaagagcagtggttgatggcagtggacgccgatgatgatactattgaagaagcgatcgcacggaaggaagctcgtgttgagcgtcgcaggtctaacaagactggacgtgatggagatgactcttcacctgagccatcgattattgatgatgacgagacccctcaaaagcagaagcgccgtcgtggtcctcctcccaagcgcaaggccgaggaagttgtggaagaaacgccacaacctaagcgcaagagaggccgccagcctaaggttccggatactctcaaccccaccgaccgtgccaacttgactcgcattcttgacaccgtgatccagtcgttgatggacatggaggctgaggtgccaccagagggttctgatagtgaagagggtcccatggtccggtcaatcattgatccattcatgaagcccccgccgcgttcttattatcccgactactacatgatcattcaaaatcccattgccgtggatacgattcagaagaaggtcaagcgggccgattatcagagcttgagggaattccgcaacgatatccatttgctttgccagaatgctcgcacttacaacgaggatggcagtgtgctattccaggatgctaatgatattgaggtaagtttgattcttgtcgattatcaattattatactaatgatacaacagactaagtgcttggtggaattgcgacgactgacggaagaccaccctgagctcgccaactttgaagatcagtacaacggtgaagggttctcgggcgccgacactccgcttaatgctggcactcccggccagccgaagctgaagctcacctttaacaatcccaaccgggatagcccaggcactttacacggcaatgaatacggccttggcgagtgattgttcaacactgggctgataacctaatgcagccatcccacgcttcatatagcgcctgcgactcttcaagttgctcgtgcttcttcttgtcatgtgtaatccgaaaatacttttttctcccccacttctgtgccatctaggaaaggcgttttttctcgtgagtttttgttttcgacattggggatggacttccggaggatggcgctgtattgttccaagcgattgatttccctgggtgtgttgtcttgactgcatgacaaagatccgttttgtgcaagaccaccccttgtatttgatgagtatgtacctgcaagttaggaacaattcgaattgatttgaaccatgtacgttgtaatattatctattgcgagacttttacaattgaagacatacgtcatttgttttccaaattctgtccttacgcgggggcgcccaagatgctgcagatgctcaccgatctttcagatcacataaaggtaaggtatcgccagcagcactcccttctaatacagacacactcttccatttagtcctcacctcgcaactatgtccacgaacaaagacctagccggcaaagtcgcaataagtaaggtctacaaccaccccaagagccagtagactaacagcgaaacagtcacaggctccagccgcggcatcggcgccgccatagccctaaaactcgcccaacgaggagcagacatagccgtaaactacgtctccaatgccacggccgctgagtccgtcgtcgagcagatccgcgctcttgacgtgcgcgccatcgccttcaaagccgacgtctccaaggaagaagaggtgaaggccatgttcgagagtctgcaccgtgaattcggccgtctggacatcgcagtcagtaactcgggcatcgagcatttcgggagtctgtctgaggtcaaaggcagcgatatcgacgctgtctttgcggttaatgtcaagggacagtatttcgttgcgcagcaggcttatcgcttcatgggagattacgggcgggttattttgacttcgtctatttctgccgttaaggtgagggctagagttgtagttttggtggtttgttaggttggagacggagctgacttctggtctgatttagggtgtccctcgtcatgctgtctacgctgcttctaaagccgctgtgcagggtatgaccaagtgtctggcgatggactttggtccgcgaaacatcacggttaactgcattgcggctggcggcgtcaagactgatatgtatgctgagatgtcggctaagtatatccccggcggcgacaagatgagtccgcagcagattgatgatgtcttgagcaagtggtctccgatgaatcggcctggggaggttgaggatgttgctggggttgtgtctttgattgctagccctgagtcgcagtggttgactgggcagacttggcaggtctctggtggtgcttatatggtgtagttagatggtgtaaatggttggaatgggactaatccaatctgatataaccagggatatcacatgatcatcctaagctttgttcttgatctctcgatagtcacgaatgcggatgctagtgtctacctggggatcctaaatatcaacatggcactacacacaatccgaccccttttcaaaagaacctctagctcattatagatcctatctgacctacatttggagatcaatcaacaatattcctttgaagtccccgtttgctccaaatacctcatcctagcaggcgacatcggccgtctggaagactacaacagctagcgtgccttcctacaaacctaaacatccaaattcgagatcgtattcttagcccttggaaaccacgaattctacgaaacaaccttcaacacaggcctcgaaaaagcaaaacagctcgaaaacgaaccctgcatgaatggccgcattgtactactccaccaacgtcgctacacatccgggactccgacgtgacaatcctaggctcacactctggtcccacatctcgcaggaatcaaacgaattagtcaattacaggatctccgatttccaaaagatcaaatattggtccgtcaagcaacacaacgaagctcactactccgacttgtcctggttaaggggtgagatcagagctcttcgggagagtacacaagaaaagcggtctgttctggtggccacgcatcatgcaccatccctgcagcgcacttcgagtccgcagcacgctgaaattcgtggaattgtgcttttggaacggatttgctggagttgccttgggatggagttaaggtttgggtgtttgggtataccaattatacgactcagtttagggagagggggattagggttgtgagtaaccagcggggttatgtgcttccttggaaaagtgaagaggggaagtttgatgttaggaggatggtatgggtacgattgaccgatagctacagaagcaagaagcacgagacttggacgaagatgaggcttaatggaacatggctcccgatatcaagccggacagacaaggcaaaaaactacaggtataacgtcacactgattctaccttagaatatcggatgcacctggcacagtattcagctgtccaaaaggagaattgaaagaaggcactactgttgcaagtctcatcgtctcactattgacggtagctacgctgaatacacccggcccaaccgcagatgctaaaggcatccggggattatataccacggcgtgggtctgtttcattcagaatatggggatatcagctattccgtggcttctcgtctgcggtagtaatactgcttcttaacgaactgttacagcttcgaaattggcttctatgctttgcgcaaccctaacccaaaccgcgctaggcctaacacggatagtatcgatacagggactgttacgtcgaaattacgtagtactatagtttcaaaactactttgtactcgtaagaaacaatggattgtcaaatgcagggttactagggagaatcgcagtgaattgtagacaaaatcagacaatgaaatacaatatagtgagaggaacccaattcgagaaaagcagaggaaggataaacggttcatgccttcatagcaagatgcgcagtttcccatcccagcagcgtattgtcatggaatatagtataaggatgagatgggcctaaaactcgttgttccttgagcacgcaggttcgaagcaaatcgattgctttagtatgctggcctgtagaattccacgtgaaggctaggttagccatgcccatcaacgtgttgggatggtccgcgccgagtttcgtcttgcgagtctccataacctgcagctggagctgctccgccttcttccatcggccctggctccataatgtcgacgctaggttggccatactcagtagcgtatcaggatggtccataccgagttttatcttgctcgtctccataacctgtagctggagctgctctgcctcctcccatcggccctgattccataatgtcgacgctaggttggccatacttagtagcgtatcgggatggtccgcgccgagttttatcttgcgagtctccataacctgtagctggagctgctctgcctcctcccatcggccctggttcctatatattgacgccaggttagccatgcccgtcagcgtgttgggatggtccgcgccgagtttcgtcttgctcgtctccatgacctgcagctggagctgctccgcttcctcccatcggccttggttctgtaatgtagacgccaggttattcatactcgccagcgtattgggatggtctgcgccgagtttcgtcttgcttatctccgtaacctgtagctggagctgctccgcttcctcccatcggccttggttctgtaatgtagacgccaggttattcatactcgccagcgtattgggatggtctgcgccgagtttcgtcttgcttatctccgtaacctgtagctggagctgctccgcttcctcccatcggccttggttctgtaatgtagacgccaggttattcatactcgccagcgtattgggatggtctatcgggatagtacgcgccgaatttcgtcttgctcgtctccatgacctgcagctggagctgctccgcctcttcccaccgcccctctcgtccgtagactattcctaatatcgtagtgctatcaagggtgtctatatcttcggcgccgccaatcttcattctttgcttccttgacatagctgccatatcctctgcaaccgaaatactgccacattctatcgcataccacgcccctttatagagtagcgtagcccagttccggagtgagtcttgcgatttcggtcgatgtgccacagctgacctaacatgtggaaacagtggccggcatctctcccaattttcatattgaccgatcgggaattcaccacatagattcttgatgaaacgttccttccactcctcctcctgaccatagtttttcaaccatatgtgtactgctagctgcacaagccgatgcattgtgaacaccatactatctttatctgaagtgataaaagaatagtctttgagaatcacaatatcgctctcaaaatcgtcatctacgtcaggttcagacgagtgatccgtatcctcatcacttgatctgttcccaatgtcttgcggagaacttaaaggattatgggttttgtcttgcacccgtagaagaccctctgggattccctgccggtcgaaaaagctcatcagagacagcaaatcagcggcagactgcctgatccgtcgaatatggtcgaacgaaatttgccaagtcagtaggatcgagttttttgcctcccagtctcgatcgatgtattttccctcgtgattaagaagtcttgcggcttgccgatcaccctgctgaagcttttctaggtattgcaataccgagcattggggtgcacggtgggtgatgtagctagcggcttgcacaatcgcgagtggcatgaattcgagttccttgactagccgaaccaattcctcagtctctgcaaaatcatctagcttcttccgcattagaaccagcgcctcggctgcattcataggttgtatatcgatcagatgtttctcatggccggcgagctctagagctacccctttattccggcttgtgacgatgatggaaccattcgagcttgcgaaaaggtaccttagcggtggctgcgttggggcatacctcgggggttctgcttgggcctctgtccgagtagtcaatggtttgcgaaggagctcatgatcatcgacattatccaggaccagaatccattttccgatcttgccatcttgcaaccagttcccgaagagttggaaaatattagagttgcgatcctgacgcccgggaatcttagcacggtcggcaaggttgcgcagactttcctcgcagcgcgcagcattactcgcgtgaacccagaaaacccaggtgtcaggcgattcctgtcggatttggtggcagtattcgatgacgagtcgagatttactgtcgcaaagttagacttgaacagaccgctcaggactatgttctcacccaacccctcctatgccaaagataactattctagatcccgggatcgaggatgttttgtggatttgagcgaggagttcattgcggctgacaaagtcgggatcatgctggaatggcaccgtccacagtggttccgggcgaggttctggttggtctaaggtttcgatggttaggtcaatttgctcttccaaaaaatgaaggtgattgattacctgggtgctggtggtagtgcgtcccaccatggtattcgctgttgttactattgtccacatatcctgcaaacacttttccaccggattctgcgttcacgccagaaatatgttgtgtaatggggactcttgacatggttgctctcgtcctgagcttcgtaccacgattgccaggcacagttaatccaaagaggctgatatgagcagatggtttttaagaaggaaaaagaatagagagatgaatttctagccaagtgtttgccaaagacttatataatcttatgccctctttgccgtggtctagccccggtaagcatttgatccgtttcgcgggggagaactgcattcttccctacttggctttctttcgagtcgatcaatttatacagaatcaaatttacttcaagccaataaaagtgtagcaccaaattattgtgatctaacttggttcctgtgatatggactatataaagttgatacgaaaccatcttgaccgaaaaccagcatgtccaggcaatgtatgccggttgtcctattattaggtcttctaccaatgatttgcagcgcatcccgcgctatacgaaaagctgcatctcgtatttcgttgtcacatcagctgcacttggctgaacgtgttgcattgcaattggtcgtcagtaatttgaaggctgatttcacccaggtgaagggggttggaatcaggtcgatcgtttgagcccattgtatgtatgttgcactcgtaaaaccattcgctgataggacaacgttcctaagatactagcagccataagccgcaatcaaatctagatcacttcagacgctcgtgccctacatccataataaattggcatattctcatgtcagaaacatctggcaggaaacaaattccctccatatataaaaaagcaaagcgcccaaatctcaagatctttttatactaaaacacctgcagccttacggtacttcacataccgtacaaatggcaacactcggtatagtcactggtggtatagggattgctagtgcgacaacacacagcatccacaaactgatccagactatcgatgctatcaaaagtgcaccaaccgagatagctaatctcaagaatgagctattggccacggagcaggttctttcggggttggaagacgcaaaccagagctcccagcttgaactccttcctttcaattccagacagactttgcagagaaccaatatactctgcaaagatgcctgtgacaagtttaaggacaaattagagagctggaccaagcgttcggatgatggcgtcagtatgcgagatcgctttgggttcggcattctccgtcaaaaatctgtcaagagtttatgtgaacagcttgaacgctgcaagtcaaatgttaacatggcagttggcttcgcaacaatgtacgtgtttccacatgtatgaaaaccaccacaaagcttgataggctaacaactttgaaagtacaactttggccttgcgttctaccactaacgcaatgcaaaacgacttccaagccagagaaaatgaaatctcccaacaaatagtcgagattgagcagcaaaatgcggtagtacagatggatctagatgactccacagaggtatcgcttccaaacgatcaggagcatactctacttgtcgaccaactcaactatcaacgtgctactctggaggcctctcaggaattcatgaaagatctgcttacgcaggctagtcaggtccggagaggacaaaggataactgatgtcgaaatgagcggaaaaggaaaggccctcgttggaagagtaggcttcgagaatgacgaaggcgatctttatcaggagattcacaacatcaaagctacaactggtggcaagggaatagtaggggtggttaaaggattggacatcaatgcgtttttcaaagactagatgaagtgcgtttaggcctcgaagcccatcctcgtctgagtattctttgaaagagagaagtgaaagttcactaaattgaaggaagaagctctataagtcgggggcttgtaacttcatttctgtcttctttttattgtgctttttataccttaatccacaagctatccacccgccgcctctgtgagatagtcttcgtagatagacgccatctcctgcggcagaagcatgactatctttagagcgcacgtgtgcacaacaagaaagacgctattcgaattcaagatagaaaattgtcaaggagaggttgggattgatataatcaattcaacaacaacacaaactaagtacaacgatttgaagcaaacatttaaagtcacaaacaaaaacagaacatgggaaagatttcatcgcatctatcggccgtcacatcaaggttccagcttgctatattgaccctgaatcaatgaaaggctgacatggactcgccgatgatacatcatcatgtctcatatctatcatgaaggttatctctatataccagcgtttgtatctgccagtgaagctctaatttcacatttgaagggctcacccttgaaagttcccagaagcgcgtgaaaaacgtgctcaattaccacagacttccgttcgcggcatagacatactcagccagcaacccacccgagatggcaacgccggtcatccagaagccctgcgagaaccacgaccagcagctcgcggggtccttgagatcaacgaagaagaccatcgcgcctacggacaggaagcagccacccacggtgacggaaaagaaggccatgctcatgttggagtagtacccgcaagcaaagagacacgcactcatgccgaggaacaagacgaccaggaacagacgcgcgtagctctgcaggagaaccgcggtgctcttcacgccgactctcaggtcgtcctccagatcctggtgggcgtagaccgtgtcaaagatgatcacccacaaggacgaggccacgaacagggacagggtagatttgtcggcccacggctcgggcacacccatggccgcgcttccaatcatgataccccacgtcagacagaatcccagcaccacctgcgggaaatgggtgtgtcttttggcgaaggggtagtaagtagtgccgaagatgttgggcacagcagccagggcgatgctgctgggaagaagtaggaggaaagaagcagcgatggcggcctggatgcaggtgaagatgaaagcggcggtgagcgagatggctccacgggggatgggccgtgtgcaagtgcgcgcgaccagcttgtcaacgggagcatcaatgaggtcgttccaggcgtggctggcattgttgcagaagaagcttccacccagcagaatgagggagacacgcaggacttcttcgacggaagacttctggacgctagcagcgtggatcacgccgaagaaatgagggaagaagatgatgaagaaggcggccggggggctcagacgacagagctggatgtacgggacgaaatatgaagggagatagtccacccatcctccggcatgaacgccaccgtattgctttgacaacgagtccttagacttgccattggctgtgccattgagctgctctgggactcccatggtgaaagatagcaccccggtgaaagagatgcaaagagaaagctctacaaactcgggggaagactattattgaactcttgagagcaggaggggcccgggggagataagacacggtatatctctcaagttctcgacggccagctcgcactttgcggcaaaccgtacccacatggttgtgcaaaagcaatctccgatagccttgctagtgtaagatctatccggatgaagctatatatgggtctctgttgggctgtgcacagtatctgacaaacgagtaggatcctcatctctgaacccccggggccatttactaaactggatccactggtggacagctaagagtgctcaagtggtataagttcacaaatacgaagtatacagtcgtggggatccacacatgtgcattgatacatgaaattccaatacatgaagttccggacggtaccgaacggtattggtcttatacgaggcgtatggatctatctgcatgtcagattttaaccagattgatatcatggagttattgtctgttcttggagtttgacaaaagttgcaaaaatgacattgtcagagtttgcgttgctctccaaccctacagccatcaaggtcgtcattgtagcatgcattatcactgctgtgtactgggtgctccgaagggcatatccacgaccactctcgggcatcccgtataaccaccatgcgacccaaaccattatgggagacctggccgagctcggggagaggcagaaagacatccagggaatgcggccttggttcctcgagcaggcccatcgccataactcggccatcacccagctcttcctcggaccgttttcgaagcctgcaatcctgctctcggactaccgcgaggtcaatgacattctgagtcaccgtgatgcggttgatttcaagcgagggaagaaggtggatgtattcagtggtctcctacctcatgcacacccggctatggaaactttcgatccacgtttcagagagtctcgtgatctcgtccgagacttgatggcgccgtcgtttcttaataccgtaagagctcatgtctccccaaatcccttctcaaaagcccatactaaccttgggccggatgataggtgaatgcacctcatacctacgtggtggcctgcaacttgctggagctatggcgactcaaatcccgatccgccaacggacaccccttcgacgtcgtgaatgacatagtcgaattttccttcgactccatcctgagtgcggcaactggactgggcccagaaggaggagatatcaagcggcaactctcatacctgcgcgacatggaagaagccggaactgacatctccctgccggacagtatgaatgacgaagtgacggtattcccatccgcagggacatcggacaaactggctgccctcacactgaacgaagaatctctctggaagggcttctacatgccctggcctcgtctctaccacgccatcaacaacctgcggccctcggtccgacattcaagccagacgctgagaggatacattgaatcccaaatcaagagggccattccccgattgaccaaggacggaaagcccgaatgtgctcttgactatgtcatcgcgcgcgagatcaaagccgctgaaaaaaccggccgcaagccagtgctcgatgacccacggatccgcgatgagatctgcggatacctgatagccggccacgacacatcgaccgggtccctgatctggttgatgcgccgacttctctcccacccagaggaacagaccaagatccgggagaacctgcgagagacatacagcgcggcatgggcagagaaacgtctgccaacagcggcggaattaatcaaacacgctccctacctagacgccttcttagaagaggtgctgcgagtgaactgtcccgtcgtgacgatcatggttcagacgagaatggataccgccgtgttgggctacgctgtcccccgtgatacccaggtatttttgaacctcactggcccgtcgctgaatatgccgtccgtgtccgtcgacgagagcagtcgcagcaagacatcgcagatgcataagccggctcgccatgattgggatgaccttgatcccaaggcttttcttcctgaacgctggcttaagagggatgctgaggggaagttggtctttaatgcggccagtggtccaacccttgcttttagtgcagggaaccgaggatgctgggggaagcgtttgggacagttagaattgagagtcgttctcacgattcttatctggtcggcaaagtttgatgttcccgagaagctcgtttcatgggaaacgtacgattcattggtcacggcgccgaagcaatgtctgatgtctatgacggagatttagtagtggtatttgatgtaatttagacagtgttgatttccattctagactgactcttttctaatgttataaaatgcgcagaacttgaaatcttcaaagcttgaattctatgagggcgttccactagtccaaccaccgagagatgttaacaccatcccacagcggacacagccagttctccacattttccactccatgatcagagcaagacttctctgccatagcagcaatgtagggattaaattctaagccggtaactttgccatctaggccgactgcatggctccaggccagtgaaagaaagacccacgtatcgagaacaatgcggaaagtttctatgttgcagataaccacacgtggcgttgataggtcgagaaaagtctctcttagcttacacaggagtgaaacaacgatgcaagcacatgcacgtccgagcacattggggctattaagtggagtcttataagcctatgaggggctctcggagggagctacgggaactcgggagtcaatcgagttcgtatcgggaagatcttttgcccagaactattgtgggccgtcggagaacccgccaggcgccccatcggaaaaaccccagttttgcctggaagatacgggcagctcgcttacaccatttgtttgttctgatattggttacgtcgacacctggccaaccggggctttcaggttggtacccacttagcttgtttagctacagattcaggcggctggtttcttacatacggatacctccgttggaatgtcggttttacgattctgttttcgtgttgtattgcagtcacgatgtgagattcatggattagattgacaacgtgccggttctcggcagtgattgatggcgctgacatccgatatgggctgatggaagaatccttatgctattatgctattatctaaacttcaagttcatctgcggtcttctcttgacttaccacttctacatccagttcaggaacatagagacaaaacattgctataatggcaccctccgacgcagaccaaatggtgtactcggactccgacatccgggtccatgtgtgagtatcgacgctatcctgtttgtggctatctgtttgtgactcaactaatatgactgctctttccataggctgaaaaacgccgtgaccggacgcctcgtccaccatcctgatcgctcctttgccatcgaagtgactctcgacctggtaaagggggccgacttcttctgccacaaaccgcctatgcacttccatgtccaagaagaatatatcgaatgtactcaaggccatctgggcgtggagatcgacggcaaggaagtagtgctgacggcaggtgatggggcgtacagcatcaagccgtacaaagaccaccgctcgtaccctctttccctagatcgacaagaaaaaggaaacacggtggtcaagttcctactatcgggcgagaagaccgacagtgtctttgagctgaacccggttttcttcgagaattggtaccgctatcaggatgatgtggtggtcaacggggccaagattgacctgattcagcttttcagcgtatgtcccccctcctccttcctactcctatcctcttcaatgcttgatttctcatgaatacagacatttgacgcgggtggcacgtacatctctctcccctggtggattccttttggacagaccgtctcacgcaccatgggcctcgtcgttggaagatggctgggcggactactgggttatcagcctttctacaggaagtggacttcggattggcctctggcttgccagaagatggaatcttcattttttcaacggcgatttgccgatcgctcgaagatggattgataaagcgattgataaagcaatttataaagtaattgatacatatcattcactcgtttgtgaaatagccgtcctagaactagactcaagacttcaatctcaatgcaaaatagccgatcatatcatccaagaaccgtctcaaaactagactcgacaatttaaaaaggcaaaatacccgaccctccaatctaaaatttattctgaaatagtcttgagaatctcatccacattcgcaaaggcgagctcttcgctggtctctttccagagctgctctgagatcttcttcccctcttcgctgtagataatcggtgccaaactgtaaagtatcttagcaatagctctaatcatggtcaacatagggataacttacggcaccaatttctggaaggacaggaactcgccatgggtctcctcgccatggttgacagctgcatcggtgaccattcgggctccaacagcagcagtgttggccatgcggcgcattacgatcttggcgatagctccggcgaaagtcttatcgtgctcacggttgaattcggaatcgaagacagagcccggcgaggtggcattgatgatggcaacggaaggcgggacaaccgaggccagatgtgccaggaaaaactgccctagaagcttagagaccatcatgcgatcgagggggtcaaccttggtcttcttctggtcgagcgctgccagcagcgggaagcttttcttctccttgaagggagtccatgcggcgacctctgatgagacgatcgtaatgcggctcggacctccttgggcagcgcgtttttccttgacgacagggagcaggaggattgccagcagggcggtggagaggtagttcacctggatcatctcatcatggcctgtcttggcgttgaagacgcgcgtggcgttggcaatgccgatattcaggacgacaatgtctagtcgggggaggctcttggtgcgctccgcaaaggcgacgacagagtcatagtcggactggtcaagcttccagacctcgatgctatcgtcggagagatcccggccagcggctagatcctttttagccgcctggcctttctcgtcactgcgcacagcgagaatgagcttgctgagtcccaggtcgaggagctggcgactggtctccaggccgacgccgatgttggatccggtcaccagggcggtcttgccctccaggctgactcccttgaccggggcgggtttcacggtaatctggttgtagaagaagcgaggcaggctggcctgcttttccggagtcacatcgaatttggaccccatttcagcgaattgaaagcggggtatcagctttggaaagtttggacgcaaggtgtgctggggaaaaaaggtgcccaggtggcgtgttttgcctcaggcacgtccttatcgatagaaagatttgtggtgagaaataggcatctgtgaggggtgttgaagagttactgtaatttgtgagagttgaatgaaagaaagtgagagttggttccaaggctgagagtctgggcccagtctcgaatgattgtaggatcgatctaccctaagccaaaaaaggaaagcatttacttgtatagattagactagtccgtattctgtatgaagccaggctatcgattgatatacgtggtcgcatgtccaacgtgctcaaatatgtgggtcacccgcgaaccatagcagcccgggaggcacccggccccgggggggagaagggggatcagcagaaggccggtgggaggaaaagtagaaatccgtatggacccgctgtaattaattaattttatttgcttatttgctgtatcgtactgtaattcatttatctgatctcttagtgctgatggcccccggggcggtgcataaagtgagtctatcttcgggaatttagtcctcggatgcgtgattgggaacaagctatgggcagagctactgtccaatgcgcatcgtaagattggatggcgccaagtataaaacagattggtctcccaagccatatctcaccacggcagccatttcaggtacctacagagatcatgcagctactgggtttcctgatcggggcgcttgcagcggcagctcaagcaacctccacgagcaatgtgaccaaattcacttcctttgcgcagaacctcgggctgtccgcagccaatacacgtgctttggcagcgcgatatgcaaaggctgacgactcggttgctatcttgaacgttgcatgtttgactgcgcagggtgtgcttggcgctgcaaatgttgatacatcgcctctcaaccaaactattgtggatgtaaactggtaggttgctatttatcggacctttgtatgttcgagctttttactgaccaatcaatgaaggtccgaatcgtgttttgcagagccgcactgcatcattcagcccgaggtagcccaggacgtttctacggcggtgaaagtcataggtttcttccaggtgaaattcgcagtgcgcagtggcggacattcgccgaacccaggatggtccagcattgggagccaaggtattctgatcgatttgtctaaactaagctctgtcagcctgtcaagcgatggcaaggtagcgagtgtcggtccgggtcttcgctggggcgaggtcacggaggcattgaactcagagaaggccgtggtgctggggggaagactgccctcggtgggagtcggtggtcttattctcggaggtaagtaaaggtgtctattcatggacccaaagatgcagtctaatcaggagttacaggaggatatcatcacctctctactcgctatggcctagcggcggacaatgtgcataatttcgaggttgttctgtcaaatggaacaattgttgacgcgaatgcggagcagaacaacgatctattccgtgctctcaagggaggtggccccaacttcggcatcgtttctcgttacgatctaaacactgttccggtctatgaagtctgggcggaaatgaggtattattccaccgatcaagctcccgccgtcctggatgcctttacggagtggcagctcaacggagcctcggatgtcaaatcggtcgtggctattgatatctctttgacctctatagtcattgggcttgtttactccgagccggccgtcaagcctagcgcatttgcaccattttatgatctggagccactgtctattccggtccccggaatgaacaccacgtttgtcgttatcgatgaactcctggcatccgcatttcccactgcgaaggctcggtaagtaattcatcaaatcccgctccctcttcagacagaactaatgccttcccagacacgactatcgcggctgcagtacccgcatcaacgccaacttgacccgggatgtctacgactactgggtggagaaggcccaagcggcttaccaagccactggtgtcaaccaaaccttcgctctgcaatacgtgggagagaatctcatccagaaagggattgagaatggtggaaatgccctgaatatcccatctggcccccagcaatgtaagactcacacttctcatctgatacgaaaccgtcctaatgtcagctacagggtggaccaccattgtggactgggaaaacgaggctgatgatgaggccgcgcgatccgtttccattgagacgacaaagtactggaagaaactggccaaggagcgtgggttggatgtgtccttgacgtacatgaacgacgcctcccgcgaccagaatcccctggaatcctacggggcgacaagtctaaagcagctgaaggcaacttccaagaaatacgaccctacgcagatgctccaaaggttgcagaacaacgggttcctgctttcgaaggcgtagggaattccagccccggggtccgcctctgtctgcactactgtataggtctcattaaagcgaatttattgggtgtacatggaatattaaaaccatatctactagaaaaccaacaaccaatcgcttcaaatgttttcaatttcccttggatacttcaatattccgaaattctgcctattgggtacgtaatagttccaaggttgccacggacaatcctaatattcatgcacgagcgagacaatctatagattccagagcactgactacacgaactagttcatatagtacttcaggtctttctcagcgaaaaggatcgtactatggtgccccgatcaatatatcagcctcaagcctgtgcctttcattggctctgccccctatcagcgtacttattgcgtgctactagtacccatttctttgcataaacttggaagtatatccatttgcacgcatgaagtagtggtaatatagataggtacggagtgaggcttcaggtattattacatacgagtactttttaataccactgtatattacacacaaccagtttacaatacatccgtggggcaaatgtgataggtcagcgggtagatctggaaaagatgcggcccctgaggcatccagtagatcttgcttaatcgaatgttggccccacgaggtaacccaaggctaatctaggccaaccgtggctgagaccttggaactgagatgcattccttcgcaatccttgcaatctatgtttcaatttcgcgaaccggttttatcagggaactgcggcgggtggatacatcctagcgttgcaatgatgataataggtacctacaacataagcagtaggagtaatcacggcaatacgatacccttgcattgccggtgtatctgtaaaggagttttcccgggcaaagtccgcgagtgtgataatgatagcgcactatgcagatacgatgttagcatcgacggtcttcatagtaaatgaggattgattctttggacttttttcggcattccctcaatcttgaaagtgctttctttgccttgtccattatggactctctacatgtgcttgctgcgaatgcggcagagcggccgactatccttgttgctctggtcttggtctttctggtattggggctgaagctatctccccggggaaagcagccgccatatcttagagagagaataccatatgtcaccaacactattcaatatttgacagacgtgggaacgtttttggatcgagtgacgtaggttttatatcatttttattttctaagaattatctaacaacattaagaacaactctggacaagaccaaaagcaacattgtcaagttccatgtcggtccgataccagcatacattgtcaccggcacgaagaatgtgcaaacagtatttagttccccgaacatcctagatggcaacttcctccagcttatgttgatggagcgccactggggaatgtccaaggaagaaatcgccaagtttgcaaacgacaaatccggtcgactgaaggccccagccccaggaactgagaataccccagctgagaagagattctggcgcggtcacgaccacctgtacgctgagtacctcagtaaccgcacgtatgcggatgccctcgccgattcattctactctctgttctcggagcgtctggataagcaatcgacgacggaatggagcaccgtcaatcttttcgagatgctgaagacctcgatggctgaaagtgccattatctcgctgtttggctcagagatcatcgatctaaaccctggtttcattgactgttactgggagtttgatgaaattgccggcacgcttgtctgggggcttcccaagttcctgcagcgacggtcggtagcgataaaagatcgtctacatacgatgaccaggaagcacatcgattccgcatgggaacactttgactggaacgggcccgatgctgagtccaagtgggaaccccattttggatctcgtttgtcccgggagacagcaaagtggctgtctgaagggggtttctcgaaccaggcggccgctggacatacgctggcttcgttatttgggtgagctcttcgtgatacttgtacatgatatttgaaaaactgcgctaacgtttatcaggctcaacgggaacacagtccccgttactacatgggcgatgatcgagctgatcaaggaccgaactctgtttgaggctgtgcgcacagaagccatggaagcctatatcacggatactaacaccggagccaagcggatagacgcacaaaagctcatcaatcttcctctgctgcagtctctctacattgagattatgcgtctgcatgtatctttcaacgtgacgcgcaaggtgatgcagcccatccaggtagacggatacatgatcgagaaaggggccttgttacagacctgctcacagattgcacactacgaggacgctgtctgggccacctcggagcatcccgcctcggaattttgggcctggcgacatgtacaatatgtagattcgcgagatgactcaactggggagaccactcgccaggctcaatttgccatgaaggggagaccaagctcgttcttcccatacggtatgtttctccttctatcctacgacgccgatactgactggcttatcccaggtggtggatatgtgatgtgcccagggcggcattttgccaagcaggagattatactggccattgcagttttggtgacgaaatttgacattgagtttgatgaatggctggactctactgggaaatcctcggacaggccggctcaggatgattccagatttgctggcttcatcgctatgtctccggatcgggagatgagaatgcggtggaaaagacggtggtagtatctccactaaacaagatcgaaagatctccagggcttcaattcattccaaggttgaatatattgaatatcattgaaacccattttaagaacacacatgtgcatgcaagttatgcatacagcaaaatgaactttttcctgctccaattgtatgtcagaccgctggcgatcggggacgaatgtctctccagtgcgatacaattgtgattgtgaccgagaaaatcactccagaagacatccggcatcaagcgagtctgtgggagctctcttatgctgatagactcactatcctggattcacgtgaaaggagccgatgctccgatgccgtcgcgtttgagcccctgcatggtctgattttggaccatcttctggactgcgcagaaaaaggaatatcgactattctcggcatcgcacatcgcacatcgcacatcgcacctcggtgcgttctagaagctgagcctgcaatacccactgcaggtccttgataccacaccgttcgacctgttggctcacgcgcggcgcaattttgccaaggccccgaccatgcgtgagtctctgtgcgaaggcgtacgctcgatgtcggttgatggctacaccgaaggaaacattgacgaggctgtcgcatctgctctcctcatggatgcgtatccctcaagatcgatcccccctcgttgaacatgctactgacttctcaggattctccccggcagtcttgataaaaaagctctatggggagtggtggtctgcagagcgagaaggcaagggcattggccgctacgaacgcgcattgtcgcggttcaagcagtattttgcgcagctatgccagagatcatcgtcgagcattcgaaggccacgctcaaccgcctctatagccaagacgatgagaatgcgctgcggtcctctgttgtttgttttgtttgtctgagccgccttgtgtgacacgtgtgtcgtgatctttggacacgtgatctttggacaacccagccagctcgggctctaccatgtcgacgtccatgttaccacgacaaccagaatgaagaatcgcatgtcccaactccgggcccttgcaattgggaaagtatatgttgtagaatatccctccggatcataagttcgacgccgttctgaaacttattggcgacagcactgttgttgattcaccccagatggcgcgcggaggaggaccgggttattggtggatttccgcctattccgaacttcgatcctctttcgcagatggcgtgtggggttcacttcagcttctttgggagatttgtttgggaacccctgagtctcctttgctacccccttaagttggatactagcggcatggctatgaatgtgggctcaatagaatgaaccggatgtcaatatttccgaacatgtctcacgccaagcgactagtgaaaatgattgaagtgaataatttttgattacttttcgagtctagcctttctcgattgaatattcatggtcagctatattgtagtcaattactccgtatagctcctcgtaggtaccttggatctcgattagacttgccagaaccgaagtttaaccgcaggagactgaacttcgccctggatcagatccgtggaattcgacatggccacgcgtacgtacctggggatgacgcggtcgcccggccatggacaagttttaagcttagatcttggatatatgggaataaaccttagccgacggcatcaaactcaaaaaaagttaatgtccttctcgtccatgactggtccttttgaggacatgaggtactccgtaacccttaattcggaaggctgaattaaactacacatgctaggctatggggaatgacccatttcccttcacgctctatctcgaacctagtctgagctgcgccttgtgccggtgttagatgatgacgactgagtatccacgcctatcctcgattcccggtcaggtttcatggtttgattgcaggcaacgcaacggcttaaagcatgatctgcgctttagttactagaaactggagccgttatgtagagtacctgaagatcttataagtatagcctctggtctttccattttattttcttgacacttatttttccattttatatctattcatttgatatacctcgacatgcgcgtctccttgggcgctgctgcagccctggcagcatcagcaggtgctacttcccttgctgatgtctgtaccgtctcgaatgtgcaggctgccctgccctccaacgggactctagtgggtatcagcatgatcccctctgctgtgacggccagtgctgtctacaatgccaccgctggcacgggaagcaccgagacttatacctactgcaatgtgaccgtcacctacgagcacaccggcaagggagactccgttgtcatcaagtatgccttccccaagccctccgatttcaagaagcgcttctacgtcgccggcggcggtggcttctctctgtccagcgatgcaaccggtggtctcgagtacggtgctgtcagcggtgccaccagcgcaggctatgatgccttcaactacgcctacgacgacatcgtcctctacggcaacgggagcatcaactgggacgcaacctacatgttcggataccaagccttgggcgaaatgaccaagatcggaaaggtcctgacccagggcttctatggcatgtcttcctccgccaaggtctacacctactacgaaggctgctccgacggcggccgcgagggcatgagccaagtccagcgctacggagaggaatacgacggagccatcaccggagccccggccttccgtttcgcccagcagcaagtccaccacgtcttccccgctacagccgagcaaaccctcgactactaccctcctccctgcgagctggcgaagatagtcaacgccacaatcaccgcctgcgatcccctcgacggccgcaccgacggcgtcatctcccgcaccgacctctgcaagctcaaattcaacctgacctccatcatcggcgaggaatactactgcgccgccgaaaccagcacctccctaggcttcggcttcagcaagcgcgccgacggcaccagcacctccaccacccccgaacaaagcggcaacgtcaccgccgagggcgtgaaagtcgcacaagccgtctacgacggcctgcacaactcccaaggcgagcgcgcctacctatcctggcaaatcggctccgagctcagcgacgccgacacgcaatggaacaacgaatccagcaagtgggagatcgacatcccctcgacaggcggcgagtacgtgaccaagttcatccagctcctcgacctcgacaacctctcggacctcgacaacgtcacctacgacaccctcgtcgagtggatgaacatcggcatggtccgctacctggacagtctgcaaaccaccctaccggatctcacgccgttccaagcctccggcggaaaactgctgcactaccacggcgaatcggaccccagtatccctgctgcgtcgtctgtgcattactggcagtcggtgcgcgcgatcatgtacccgaatctgtcgtcccaggagagtctgaaggaactcgccgattggtaccaattctaccttatccctggtgcggcgcactgcggtacgaattctctccagccgggtccgtacccggagaataatatgcagactatgatcgactgggtggagaatggtgttaagccttcgcggttgaatgccactgtttcgtcgggtacttatgagggcgagacgcagatgctttgccagtggccgacccgtccgctttggaagagtaatagcactttcaagtgtgttgatgatacggcttcgattgagagctggacttattctttcccggctttcaagctgcctgtgtactaggttgtatgtacaagggagctttgagtatgccaaggatgtttctctcgcttgaggtattttgggtttgagatgatcagccctagttcagccctagaagtctgttttgaccaattgggcattatactctagttaattatattctgtgaatgcctattatttctatcatctgcttcgtcttatagttagtgtggtcttgatcattaagcaaagggttgagcactgcctcaatggtgtcccgtcaggggtcagtttttgaatgaatattattagacccattgcacaacattatgcctaataacttctcggattgcaagtaaaggtatgaaaaacatgcaataaaattagtctaagaacgcgcccacaatatgggctattccgatttgtttgagaattttctaattttaaaagattttttttctataaacaacgacatatctagaaagaaatgatttgtgctttgtaatttgtgctttgcaatttgttcagcatgaaaactccccataaccaaaaggtatatccaacttaaacaccaagaatcagaacccgagccacactctaacccagagtcagagtgtaagcggcatcgagactgcaagccagggtattgacatcatcaggttgctggtaggattcaacgcagtcggcatcacccgcagcgcaggtagcggtggtgcaggactcatcactgatggtgactccgaatccagcagtgacgaaagtcgaggtcttgaccaggttgatggaggacaaatcccagaagaggatgtcaccggactgggtgtactcgaactgcaggacgtcgtcgcagacctcggtggtggacatcttgatggagataccgccgccgttggagttggtgagccaggtgtcgctgaaggactcgccgggggcgacggtctgcatctcaccggggtcctcggtgacaacccacaggtagacggtgtcctcgaggttgttgacaatggtgacaccgctgccggtggcggtggcggtggcggtgctggccgaggcggtggagctggcataaatgctggtgctagtgggcacggagacagggacgctggtcacggtagagataacgggagtcaaagtcgagtaggcgacgacggaagtggaggaggcactggcgacctcttcgacagcgacggcagtagccacgctgacggtgctgccggtctggtagacggtttcgtagacggtctgccagacggtctcctcgatgtagttgtcgtcggcgacggcaatggggcgggcggaggcagtcagtgccagaagggccgagagggcggcaatgttgaagcgcatattggctggatgaattcgatattcaaaggaaggtgtttgatagacagtgagatctgggtgaaagagggactttgatctgatctacagactgttaaagagagtgatgtgatgaggctcagccccaagaggtaggaatccaaaggagtgtgattcgaaagatcgtgatggtcaaaggagagaaagaaaaaaagaggagaagacggaggatatagcgccattttattcttaggggtggagtacgtacgagggcattgggcgtgtcagattttcagtgtggcggccgtttgataggccacccccattgaaccgccaaattgggtttggccgtgttgtttccatgtggtcggtgcctgactagacgagaccgtcctgttgatcccattggtagccattgctggggtcaggcacagcgatctggtccgaccaacccgaatgaagacggccagcgaggttccatggatgggccagttcctgagccacgatttcgccggcgctggtcttggggattgtgacttgttccttagcctggactgtggagatacgcgccaggtctagatcgaatcagagtagacagcgcctgcggacggaaagttctcaattgcgcggacctgcccctgaatatctttttttaatgcctacaatctagatcactataagtgactctggcattgtccgggccaagagggacttaatacaagcttatattttagaccgaaacggggtgggaaggagagtagattatcgccggagtcttctttgtcctccgttggtgccagcatggccagactgtggatccaaattgagtcactccatggtttgattaacttttctctcgggtaccctacggggtacatacatgatcaggcacaggcacatacatcgggaatcgcaccctctggacgccacttcggtacatccagacgggttcctggaaaactctgcatcctgccaagccgtgataggtggcaatctatacaccacacacatcttgaatcggtaccggtcaaatgcactagaatcccctatacatccatggacgtggccattgacccgccaagccacaaccccgctcacaaacccactccgaaaaattgctatgttgtacatggcgtaacagtgttcagggtgtggccccgtaggctacatcattggggaagacgtgggtttttcgggcagccgacgtattggaaacacgaccgtcggcgacaaatccgtggttctcaggccccgtactgcctgccaacggacctccccggctgtacgtctcgagcgcattaaacacataaccgaagacttggcggtcaacgtccgaggcccacaaaaagtctagatgctcgtaggtgggaatcgcctgggcgacagtgtcatgtggcagcccctttaacatcacgccgatatcaacgaggctatcgttgtcgccgtacagcagcacaatgggggttttgatgttgcgagtagggtatttgaccggcttgtaaaagcgctcgctggcggcgacgctgaacggggcatagagttcatcgtcgtagaactggaaattcttgttccgaatgatctggaaccaatgcaccacagacttggtgctggtgaaggagtatagatgcaaatacgcagcaagcttttgtgtttggctgatgttgcggcatttccagttgaagagggcttggagcgctgtgtcgataatgcgcacgaagatcggcgggtacagtatcgtctgccacatagttgtcgaggaaagaatgctgcgtcgaccgaacaacaggaacaaaaagtccggagaggctttcataagtgaatcaacaatgcggttgcggaggcccgaaggagccatggccggcgcaagtgccacaaacacatcaatcttctggttgagcaatggatgaatagcgagcgtagcgaatgcctgcgctgtcccctgggagaatccaatataggacaatgacggctgatcggtcacctcgaggatgtactcgatgctgttggggatatcagagaaggcgaactgatcgatagagaaatcccaaaactcattggaactcggcgagcatcggatcgacttcttggagtatttatttccacggttattccccagccatacatcgtatcccctttccaccagctggaagggcaggcaccgttgctcgtctgtcaaggctacccacacctcactggacatcatcaggccgtggtggaggtagacgacttttttccgaagcccattgggaccattattgacgcgcattttctcttctccttttcgatatgctaaccgatgaagtccaagaaggtagccatcgcttgtttgtacaatgtgctcctcggcttgaaatccgaagagtgcacatatctcggtgaaatctgacgcgtctgcaatagtggtggcaaatatctcctctttggtgcgcttcagccgggattcacctggtattaaaaggttgaaaagcgccttggattggccatagcagaatgtgatgatagggccagctggttaggggttaatattggtatcatccatattcggtgattttactaacgaaggcaccaagtaatcaagtgaatgattgtctcaagcagaacaagaaccaaagaccccaagagggctatatactcatacctagacgtgaaggtcagttgctgcgttcttcataaaagctagagttccttaccagaacaatctcccgatgaacggaactcgcgacatgatgagcaacaattgttatgcatatgtgcaggtgcacttggatactctatactcaagacaagaaagacagagatgctgcaacgttacgtttaaaagcgcaaacaaacgatgaatgcccccgacgtcattaccaacatgtgatagcgatgcttatctcatccggggattcgatctatcaaccaatcagcgtcgagataactaacggcctaaatttgccgtacggtctcgttcctcgctctcttgctacttgtggttgcgcattcgtccacaaggtcgcgtcaacatgcccagctcatgcaatgatatccgtacgttacatctccatgtcgcacaacgttcaaggaagggtcatgttcctggccccgctggactctctaccgcgaccctccgttgccataatgcaaactgaccacaatcgattatctagggcgggccctggctcaatgcctccaggagtctgactgcatcatggtccagcgtcatactccccgtgaatgtctcagctctcctctcgccgaggagttacccgtgaaatgtcagcagttgcggaaaggattcagcgagtgcaagtgagtcaggaaccgggccgaccattatggacaaaccggacaccctcgctaattattgccctttctcggaacaggcgcggtctgatcgatatgcgcaagcgcttccgcggcaaccagcctatctcggtatccaaggaaatggacggcgggcaatctacctctgggggacagctatatgccggagcgcccgcgtaccaaacggtcaaggaactcagcggagacgaagtgcagatggatccagagaagacaaggggcctgtaaaaagggtatttggattcgctgattacatactggcatggcccggagttcggttacgcttaaaacatacatttcctctctgatactcacattctcattcaagatcgactgagcttcttatacccaatcgattatatatcacaccttcactatctctcgcagaacatccaccagacggtcgggcatactcaggaacggggaatgcgaactcggcaggcggtaggtagtgcccggcgcatccattttcgaggcgaagaactcctggagtgctggcggcaaggcctgatactgctcgcagatgatgtaggagcaggggacatcgtgccacggctcataagtgacttcgcccgagaagaccgcacgtgaggtgtgcgctgtcgtgcgattccattttttgcgctgctcgacggtcaggtcctgccagccaacgttgtcgatgccgtcgacgtgaacgtagtcgtcctttttcttggtcaacttgatcttgacaatattaccgttcatatgatgcatggaccaacctcgactttcatccagggtaaataggctcatcccagcatgtccagcaggctctgtcctttttccagcgcaaaggcagccaggtaaacaaccctcacaatgcctccaggcttgtcactctccgcacgaacatgctccactagaccctcgctagctgtggaggctacaaaaccccgtaggagtgtgccgcaacaacaatgtcctttccctcgtatgctagagtcgttaacactctacgcagcgagacaacgtcgtcttctaatgtcagggaaggcggctcagcgccgatagaggggggcgggaggcattcagaaggataagtagggtgtttagacggtcacgcacggcatcgaagacgatgggactaacccaagcaccgattgagaagacgaaagtcggtctatccatttccatttccagtttatgtacaggagggcaacagcgttcgatgggaaagaagatatgaaaatccaggctattctccagtccttgagccgttatacagaagcgaggagcattactactgcttcgggcaagctagtatcctcatgagacttgtttaggatggactgaatggcccgctgtggatattagggaccaacgacagtcaaaccggcttcaagaggaatatgaaacatgtagttagtcaatctcacccgtttcctgtattctttaggctaattcacgtcctatcagactcctgccctcttttcatgcaagaggccaattgcggtcattagtgtcgttttagcggacatctaccgtttcacggggttgatatagcctggactctacatgtaaagcttgacagctgtaggcttccaactgcagggaggtggaaggaaaaggaaggcaaggagaatatctatcattgagaattggtcatctttggacctaatgtgttcattcgggagatcaggatcatgcaagaaaattgaaatcatggacagtccaataaatataaatctactgagtcttcttgagcttatcggccacaggggcagagtagagccagacaaccacgaaagccaagaatcctccaattaccgaccaaagaccggcaatccatacccagccgccggtaatagcccagctgcgcgggtactcgtcgtgcgcgaagtggcggttggtaacctcaagcttctcctcgatggcggtcaagaagggacgcttgtagttgacgcggaaggagaagattccgtgttgatcgggagtcacgaactgagtgctgaacacagtgctggaatcggtgcgctcgaccggttccaggttcaggcggtggaagggcgagagcatggtgaactcgagctggagcgcgtcgtctccaggtagttcaaagggaacccacttatcgtagacatactcggaaatctcaatgctgtagatctgcaggcaaataaggctcatgttagcttggaagagaatgacaatatattgtttcacgtacagtctcgttcttgatccggtagatcgaggggttcaactctgcgccctcagtgataaggcgatgctcgaccttgtcaaccttcaggacaccagtctccttgaaagcccaagcagtcaactgcttggcgaactcgcggttcacggtaggtgtcttcttgccgctgggcgtcttgacggaggccgagaaccacttgtcctccagcgactccactgatccgagaacagtgaagcgggcagagttacgtgcctgcatagcggaaatgatattcagctgcgacccggtagccaggatatcctccggcgcgggcgtgccctccttggggttgtagctgtaggcagtggcgggggccttgagaatcggagagagcagggcgctgtcaccgagagtctggggagcaactcgagggagagcaagaacaccctcaccatcaaagaaggccttgacgtcagaacggaggggtccagggcgctgcaggacaagaacgtcatgcttctcagcggccgagagggtgtcatagttgaagtggtcgacaacaacttgtgagcgatcgttggataggtgaatatcgagttcgaggagaagggagctgatggcgctggaggtggcagacttgccagaaagggcgaggaggatgtttccatccttgttcataaagtcgacgatgtgtttgggggtcaaggaggggccgaggcctgtattcttaggtcaattgactagacatcgaatcaatagtcgggtttgcgcaccttttgacttgggagggaagattagaaggtggtcgtaagctctttcgccaagcttgaacaaggcaagctgttcactcttggaagattcgattgagacatcgtatcctcgtgctggagtccgagagttagcaaaggatcaataaattgagtcagattaattaccttctaggtctgcccacaacgtggagtacaggtccttttgttctgtatcttccaaaatagccaacaggcgactgccggagctactcagcgcatttaccgcagccaagaagcaacaaataagcaacgcaagacaccacctcattttgaacaaatcccgcgcagcggagcggaaggatcaaaaagaaggaagtgaagaaaggtggttgaagatccaagttgtatacatagaaagggcgacgtgtttaatgggcgagtgccaagacccgagagcgctgggcccgcatctccgaacttcgacttcacctcgtccctccagcttcaattttgcttctctgatcctaaccactcaacaaccactcagtgggaccggtgtatctgttcgttcgtgcgcgcttgagcagtttttttctattctaccggcattgccctcccacccacatcgcaaaaccccgaccggtcgccaacgacctcctcctacagccatgtctgcccctctgttctggtcgacccccctccgctatatccgctgggctgcgcacgagaagccagctatcctcgccgctctgtgcattggcgtcatgggccccatctcgctggctactattcctcccatccgccacgccctcggtgacgtcgaccccgagcctattcctctgacatatcccagtatgaacccattcacttccaccaaatcggtgcataagtacaaaacccatattgagtaatttgaatctgaccattatcttcactacgtacagttccgcagggtccgcgggtgatccccaagggctacgatgacgaataaacgggttcggaactacgaaaatgtcaagttagagagaatttcgtgtattgtccgagctttggaggaataaattcagcggatggcgggagatgagttggctgtgccactggactgatgaacaagtcccatcgcatcagtgtgggcaatcgaatcgacttgttccgggcaacttctcctggccatcaacatgctttgataccaatatttgttgcgcatacgccgaaggtcgagctcggcgctacagtgtatgtactatgttttgtgcaataatcgacatcaagtcgctttctaggtttcaagtatggggtatcttaggaataattgcattcttgcgcacgaacagccgatatggtttccccaccaaggagagaggctgctcgccagaattagtatctgtaatacccgatcaattgcagaatttgcatcatactccgaagctgcagcatcaggtcggacaaaaaagccagcaatccaaggctgtacacaaggaagtaaccatcacaaattaatccctttcccgccttttccgccgtgtacccaaggagaagatacataaaaaatacacctaataatataaaaagactactgaaaagactaccaaaatgacaagaccgcataagcggcctactattcttgtttagatgacatcttgattactccgaggtaacagtatgcagagaaagagattcattaagatcatggagtcaatccaagaactcgcacatcaaaacgtcaatcacagaaggaccaacgccgcaaatgctcatatctacatgtaggtcaccggccttagtttatccaagcacatcgctttcgcaaaccaaggggaaaaaaaaaaaaatagaacgatgactccccttctttcaagggaaagacaaacaaaaagaaaagttgctaagaacacacaaatccctatacaccgttaaaccaacgaaaagtatcacattattgtggggtgggtattcccggaatccgtgagagcagagaaacaaacaaaacgctcaagtccgggccaccttttcgtaaacgcaatcaagacacatcactcttactcctggctggccagttgcagaaaagcatgagagaaatcaagaaggtccacgggaagtccaagctcctgccacggagcaatgggttcaattccagtgaagtccatggtataaaaaataaagtgagattcatatccaacgggaggtggaaagttcccctgactggagacaaattgggaatatgagaatggtggccaagagagagaagaaaggcgtgaagattgtccaggagattttcacagacatcaacattattcctaggggtattttggagatatcccggaagaaagcatcaagtagaccacagtgtgggtggagagaagggagaaatcatgcaggaaaacccttggggtggtcattcttgtttaccgccgacggtgggggttgtctctggttgcttgtggcctgcgctcatattccggagtgtatctgggctccattcctatccggggatccggggcagttgtggtaggataggacatcccagacgttacagtagagtactcctgttcggcatcatatccaggtcccgagtatcgtggagcattgcttcggccattgtcgtaaccatagcccgtgggggcatatgtatacgattgagggtgcatgtccgcagacgtcacaatgggctggttggaaccagagtaggaaacctggggcggggggtacggagctgtacctgatgcatatggcgagtgagtggcggatgtgtaggatggagggttggagtaaggggtattctgggatccactgtaggactgggagtagggatccatgtattgctgaacgggtgctgcggtaaagggcgtgggggacgggccctgtgactggcgagtctcatgaacaggcgcaggagcatagttcactggagcggtgttaggtgcatgggaaacgttcgtgtcttgaatgtaattcccacgcgggtagcctaggtcagcccgacgtgagacgtccgcctcccagcgagcggagtcagccttcagatcagtaatcatctcctgtattcgatgtgtggttagaatgccatcttcacttctcccgcttgctgtcgcttgtccatagtcacttacagaggtgagattccgataggcgcggataaagaatcctgggcggccctgttcatggtcagtcaaaacggccattggggtcatcgggggcacgagcggaggacgcacattgtggttgccaggtctcacgagggcatcgtttccaaggtagcggcaaatatctgcttgaataacttctcggctgattccttcaccggggatgaaatattcattctgacgctccgggcgtccttcatagcggcctgtcataatgtattccgagggaggaatatccggtttaaaaatttaaagtcctcggatccaaagggccagagaagagggagtccggagtctggaagatggtttgagagtcccgggaaagttgatggatggtggtgagtccgtttttattgtaggatgtacaaattctatcgagcaggttccagagccgacaatcaacgacttgaatggtttcttttctcgcttccagggcaagcagaaaacgagatatgatccttgggaagtggccagaaaaaaattgatcctggtcgcgaataacagtccgtgggaaagtccggttaatcctgggaagaaatcctggttgtccactggtagcaattatcctgggaaattgagaaggcctcaaaaaagacggtgatagcgacacgaggttgggaagggagaggatgggttgtcagggtcaattaggagaaagagaaacacggctgacggggtcctgggatatctgtaatctgttcggggcgaactagatattgggagaaagaatagttgtggcaagagaagccaggggaatatggggagaagggagagaaagacgagggagagggagagaaggggaagaaagaagagggggggaaggtaaagtggacatcaaagggccagggcggttgggccgtcttgggctggtgccacgactccccactgagatcaaggcaaaaagcatgcaaggtcaaatgtggattagactaatgtgcaaccctatgtctatagccgcttgagtattttaattggtatcatttatatcatttggggccagggagataggactttgtacccggtttcatataaacatgtatctataactatatacttccctgatcaacacccccgaaagtgtgaatgtacacagctatacggagtggatccctagagacgtcccttgtaccctaaaactagaccttaaaagggctgctcttgggtttcactcaattttagttgggacgaaaaaataagggccgatcccccatattcaaccagcttggattgctccctagtctgtgcccctggaccggatgaatatcgaaactctacaggactccaccggtggatctttagccttcagcagcggtcaagcaggactgctcagaagaaatgagatcataaaagctgtcagatgttcatatgtacggtggtaagatggcagtgttgaggcggcaaatcatcagactcaattgtgattgatccctcgcacaccatctgcaaagggagcatgacagccaactgttgacaaaaagacggtggcgacctgcgaacttgccaccgaaaactggtggccgatgtccacacgagattgccgttgggcaggaatgcgtggctttgggcagctgcgcgaaggctccgagcttctggtccactcacaacccgccaatgtcagctggatcgcacagatcggagatcccctgtctcgtttgtttttttcttcaggttcgagactgtcgtggacgagttacaacatcggaaaaatctgcacgagaacacaacatctgactgtgcaggagtgggtgatgaaaaataagcaggcaccaagtgatgggtcatttggacgtcccagaatacggagtacctgtggatattgaaggaattgcggctgtcttggacatgtttatgttgttgaagaagattaaaataagtcttggtatgtaagatgtaccccgttgttctacggagtaataaattggactgaagattgcagttgcccctgagttcaggagacctgtgattagtaatcgtacacaaccatcgctctgccgccctcgaccgcctgttggtgctcagctttcagttacattcaggtacggacaagacttcctcaagaaccgaaagactcgggtctcctgcctccacgggcactccttttctgagaccgtacgcctggaagatgccaacgacccttccaaccttgactgcccgcttttgagactccgtgacaatgcctgcggtagcatagagggtctcccagagaaccctccgtaattcgaggtgacgggcatgaaagtgccagccatctgcaccaaaggttcctagcaaggtctcaaggccccaaaatgacaatccaaaaggaccaacagtagcatcacgccagtcgactatactggcaatacctcctgtactcgggttgacatggatattcatttcccataggtcggcatggtttagcacctgcggatagtctagggcgaaaagcagtggtagttgatcgcggacctcggacctcggtcagcttagcacgaaagcgctcaggaagagcatcagcaagagtgtccagcctttgctcacggacttcagtcagctcggcacgaagcgctcaagagcatcagagagtctctaacctctgggaaatctctacagaagtaacggctgtgtctatccatggcgtcatatcgattccactagtccagctcgacgcgaaaaatctagaaagttaggtgtttatcgcaggcagtgtgttcaagaacactttgcaagatcatatacagtcctctcaagaaggctgtatttattcacagcgcaaatctcgcgttgggctatagagaaagcgaccccttctacaacatccatttcatacacgataagagggcctaacgagtcgcgtctcccacagccaggggcgaaatctttatacatgcttttcactagtgacatgaccttcatatcaagagcggcttcaggggcgcagaattgaatagctttaggattgacactggcaataaccgtatagctcgtcatgccgtgtgccggcgtgggagcaactgatccacctctggtaataagggcagcagtgttctcttgtgtgatagacttgtttttatcaaaaaatctggcaatttgatgattagataaagcctgaatgccagctgcaatccaccatgtatctagtgatatccatcgctaggctggctggtttcttggttggtcaagtcgtggatgtagtatgcgcgagcagctaaaagaggactatgggcagtatacaaagcacacggtggtaggacagacttatacggtatgttggaagtgttccagggtaggaaaaggttaaatggtgcgcttaaacacagaggagaggggtcttatataacgaaagtttccaagtaattaatatcattcacaagcggccacctgaataactaacacaaaacaatgtatgactcaacttacaaccctccagggctgctgtatgttgtagtctatagaagagggagaacctcagggcacgtgcccacactagtccattttgggttcttgtcccaaggtgagagcatcggattccagctctgaccgacaaccccatggactaatatttaccgtcatgacgcacgtgcgagcatgtccgaacccaccgagtcgtccgatcccttgaagctctcccggttcacctatcgacaattgcaattgttacgacagggatccacggcaacccctctgcgcgtgattgcgcatatcgatctcgatgccttctatgcacaatgtgagatggtccgcctggggactccgcgggagaccccattagcagtgcggcaatgggactccttgattgccatcaattacgccgcgcgaccgtttggaatcagtcgattaatcaatgttgcggaggccaggaaactttgtccagacctcgtcttacagcatgtcgcgacttttcgagagggggaggggggacggtgggcatatcgggatgattcgttcaaaaatattagcacggacaaggtgtcgctggatccgtaccgagcacaatcgcgaaagatcctccagacgatgaaggaggctctggctacatggagtgtcgatgatatggaaaccgaaactcagaatccgatctcggctgggttggagaaagctagtatcgatgaagtattcattgatttgtctccattgatatatagggcacttcttcggagatatccagaacttcggatgggaatacaagacgagaaccgggatgcacaacttcctataccgccgatcacagctttgcagtgggacaccgactgcttagtggacctcgatcaacatgaaacagaggaggatgatccagactgggatgacgttgtcatgctgataggatccgagattgtgcgatgggtgcggaacgctgtctgggagaagctcagttacacttgttcggccgggcttggccgcaataaaatgatcgcaaaactaggaagtgcgtgcaacaagcccaacctacaaaccgttgtgcggaatcgggcggtgcagaatttcctaaatggttataaatttacccagatcagaatgctgggtggtaaactcggcgatcaaataactgccgcatttgggacggagaaagtcagcgagctccttaatgtaccgcttgagcagttgcgcactaagctggctgatcaaacagcatcctggctttacgggatcatccgcggtgatgatcgcagcgaggtcaatccccgaacccaaattaaatctatgctatccgcgaaatctttccgaccgagcatcaactcacttgatcaagctgagaagtggcttcgtatcttcgcagccgatatatatggcaggcttgtggaagacggcgtgcttgaaaatagacgtcgtccgaaagtgatcacgatacaccatcgaactgcgcaatctcgttctcgccaaatcccaatcccaggctctaatacaattaatgagaatcttctctacgatctggcgaatactttgctccgtcaagttgtggctgacggacaggcatggccctgttccaacctgtcgttgagcgtctcaggctttgaagacggcgtggccaacaacaaggctatcgaaggcttcttgattcgtggtgatcaagcgaaagctctaagtcattcttcaagaccccgagataccgataattcccccagcgaacaagccccaacggagaaaagacgaaagcttgaaggtgacggggataagatcaaaagtttcttcgggatcccatcacatcttgaaactcctgccacagacgagccagctagcccccaagaacccgctgaaaaagactccgaacccagcgggattccccggttcgtatgtccacggtgctccaagtcgatgttcgagcatgaaaaagaagaacatgacgattggcactttgccaaggaccttgcaagccaggacagagaggaggccagggtttcacagccgccaccgcctacgaaaagtagtgcacgcggtacaagttctcgtggaagaggtggccggggtggagggagtcgggggaagcccgaaaaggggcagatgcgacttgctttccaatgacctatgagcctatgttgtatgtcttgtttttttaccatgtttttcataatctgcttttacttggcatagctacgatatacccaatgccacaaatttatgccatcgcctgattgggcggactaatccaaagttataccttgaaacgtcgattcacaattaagccctttcccgccttttccgccgtgtacctaaggagaatatatccataaaaaatacacgatttaattaaaaagagatcatgacgttctcaccgactattcttctatctcagaatttcgcaatgtcaacataagacgtcctgagatatcttggaatatccctgggctgtagcctgtgagtgcctggaagtggatcggatgttaaagtcggtgtataccaggtggaggggtggccttgagcagaagcacccaacaacccacgtcaggcaagctttgggcctctaaggacttcgatgacgctaagcatatgagactccaccgagtacatttctgaagcccaaaatggcagtttgagagaagagaaccaaggttctggcaggattagctaatattctggggtagggccggagactggaagacctggggaataaacaatggaaacggggaatctttggaagatctggatgggaatgatgtttagctacatatctcgcaaccgccctagtgacatcagccgcggggccgatgaccactttgcttttttccagggttgtcagccttcctcaaaacagttcacgtttcatgtatgtgtacggaatacgatcagttggttctcgtctacctatattgcttgtcgtactagtatcattagccgcttaactgggtgatcttgactagagcacagcccaccttcctttgcaagccccaccagtcaccaactggatttatctcttgccttcaactgaaccctttgacaggctcctgcgagcttgaactaagagtcttctccatcgtggtcgagtttccgaccgtagctacaccaaatccaatgcggtgatcactcgcacagtcccacaatgccccgccgaacaccaccccgcgactacgacgaagaagatgacttctatgaagttgaacgagagcgagaccgccggccgcgccgacgagatcgcgactatgaagatgtggaatttcgtcgtcgaaggtccgagccgctagctgaggatatggagcgtatgcacatccgagaacgtcccaggcgagacttcatggacgaaagctttgcaccgccgcgagcacgggatgatgtggttcgcacgcggacaaaggaggaggtcgatattgtctcatctgaccgcgacgatgtctccacgcggccatctgggccccgtcgtagacctcatttccgtgatgaagacgacgaggatcttgtttttgaggaacgagagacacgccggggcagtcgacgtcatccacgcgaagttgacaaggattttatttttgaggagagagaaaggcggccagagaggaggcatcgtcccgggcgagagcgagaagttgaagatgatcttgtcattgaggagagagaaagggaaagaggtggtggtaggaggcgtcgttcagagccgatattcgaagaggatgaggaaatcatctccgaacggccaagacgccgagggagcaggcaccgttcccgggaatctgaagaggatgatctgatcattgaagacagagaaatacgcagggggagtcggcgtcatccagaacgaatgtccgaggacgatcttctcgttgaggagaaagaagtgcgccaccacaggcgacgtccagaaagcggattcgaagaggatctgtcagttgaggagcgggggaaacatagaggaagaagacgtcgccccgagcgcgaatttgaggaagaggaagtgttcatccgacggaaagaaagggaagagcccccgttagatcgcggatgggaaagtgaaatcgacgtgcgatcgcgcgaaaggatactggagtttgaggaagaagacccataccgccgacgacggccacggccacggcctccgcctccccaaacggtccaggtggaagaggtcatccttgacgatgcacccccaaagcgacgccgaggaccagtcgatttttcagatcgagaaattgaagaggatgtggtcatccggcggaaggacaaggggccacgaccagacgacagtgatgacgaggagaaaatcgtcatacgcgatcgacgtgaaacaagacgcagtgtaccttcggatcccgagcccgaattaagaggattgagaggtcttcggcgaaacggtaggcgacggattccactggatggagaggttgaggaagagatcagtattcggaaatcggacatcccatcacgccagtcgccgcttcaagtccacacacctcgtatgaaactacgatctcggagaggcgggcgaatgtcagaggaagaaataatcctcacacgcagtgacagtgaagactctctcgctccggaagactcaatatctccaactagcgggccatctcttggtttcaacgatccgtgggagcgggaaacaatttcacttcatcgtcgacctgtgccgctagaagacgatagcgatatagctcacagccacgaaataagggctccttccatgcgtgagatggaaaaagacatagtgattgagagcacgcgcgtagtagacgaaggccctacaaacacggatggctggtctgtggtgcatgcttcatctcaagacgaagccattatgagcggagctctggacgttgttgaagtcaaaccccgacatgtgccactggaagaagtggaaacgggccggattgcgcagcaggtcacgggcgcggatgaatcgccaaacgatcggtggaccgaaatagcgaagagattggtagtgagggaagctattgagcagctcggattcgagtatgaagagaccagaacgtgctactacatcttctcgtacctcaagccggtatgtatcatccgaacagacgactttcttggattctgacttttggccacaggaggacatagatgagcttgttgaattgaccgacgagattcgaagtgctcgtcgtagacggatccatgacatccagcgggagcgctctgtgcctgatatcaggcctcgccttagacctcgtgtggggatgcctccgagggcatggttgattgagaagcgcatgcgagatattcgagatcgagaatggatgaattcccggtaattgatctaggaatatgatgtttacggcctatgatttatgatgaatttgtgcattaaaattggaaggtgccattgacgtcctgtatgtatcgcgagatatcctcaattcaagaacgatgtcgtccacatgtcccttttagtatgaatagaacgcgcgggctatgtataaaagatataataatcgctcgagatcaagaaacgtcttcttctctcgttcacacccagaggtataccctatatgtaagaccaatatcgccgacatgtatgatgttccttcctgagcataaacagaatgagcaggccacacctgaagaatattaatcgtttgcgatcaaaacaaagcttcccccctccttcacactccctccttcacataccctctctctttcacgcgttccctcttcacacgcagtgagatatcctaacttcaagaacggtgtcgtccatatgttacttctgaatgtgaataaaacgcgtgggatatacctgaaggatatcaatcgcttgagttcaacacaaagctttctatctcgtttagaaaccgagcacacgcgtgcaaatcggattcccacctcaccgtctttgatgcaggattgcctccacgtgggtcaacatgtcaaacgcgtccaccactgaattagatcgttcagttactgttgtccgcgttaatgatgagcgtttcaatatccagtctccccagcgaaagatcctccttcgccaactcaacagagctcttttcgaacaacaagtcccctcgccattctgggccgttctccaggtgtgcgatatcgagaagcttgagtacatcgtacagctcgccaacttgtcaatgaaactcatgcataccatctctgatctcatttgtgctctcccattcaaatggacggcaactccatctgtcgcccaacagctcgaatcagcatactcaaccccgacttcgggttcgagtttcagttcacggccacgtgcttccccggttgcaatctatgccgcccgagagcgagatggatacaagtgtgtcatcacaggaacccgcaagctctaccaaaccaccccgatcttcccagctagtgcagccagctcccgcttgcaggatgacccggattctcctagcctttggaagtttgcagatgtgttctggggaaagagtacaactgaaaggtggaaacgagccgtcttcagtgacccaactcagcccgacaatcctgtcaatgattgctccaatctgatctgccttcgcagagaccttcggtctgcatggtcgagtgggttgttcgctctgcgtcccgtctgggtctcggaggatatgactgaaatggaaatcgagttctattggcaaccaaagccagaccacaagctttacgacgtggtggatgtgtccaaggagcctatatctagcaagaacgtcaacagcgtggatcgactgatcgtggcggtaggaaagcgaggtgaaccaacatatcgtgccattgagtccggctaccgatttagaatgacaacggacgaccccgtccttcgcccgcttccgagtttcgacttgttggatatgcagtggcatttcacccgactgacctccttatccgccgtggctagtttcttcgatgctgatgatgatgaagacagcgtcagatcagaggacagcgttagatcagacacgacgactacacagccggagcaccgcggccgaccggagtatcaccctctgcatgccaaccctcccagcgcccacatactggcctgggttaaatcttcactttcatctggttccccgcccgagtcagagcaacgcaaccgactggagggtgatcctctgcgttcgtctccaagctcccacattctggcttgggtcaaatcttctctttcacctcccgagccagagtttgtcgaggatatcgatgaattcatgatggatgaagcgatgattggccctctgccagggtccgacactaacggcttgcgcagtgttagccagacctcgaaggattccgggtcggcggagtcagcgggttcggcggattcaggagattcggaagccagtgtgatgattgatgtgatttccggaactggccatctatctcttgacttcagccgcgacagttaagatgggagcgggcccaacataattcatgtacaacagcagactagttgaattcatattcttattcaatgcggatgtatcttgagactgtagtatgaatgtgttgattgaatctggggtcctataactcagttgacttgacggacatacaatgttgtactcattgtatattgtatggtcggaaacctgcagcaggaagtgatcaccgctgtcctccgtaggcttgtttcagatgctggacgccacctgcaagccaccaggcacaatagcaataattattgacttagccctgagcctcgccacatgttgaagtcgagaccttgcccaaagaccacctgggaaggccaggcctacggagcagagagagactggtcgagtaaccctaactacgcggcacccgaaagccgggagattacgtcggactgggttagctcccccttcccgcgcattgtggcggattgtctcagccatattatgccacaacatcatcacttcaggatttgccttggcagggaatattcgtaagtacggagatgcgtattaatattcgtccaatgatgctcggtattattcgcgactattgattctgtatgggtcgttcggggaacacacgacgtgtcctactgtttcaactgaaccactgcagttgtatttgtgtaactgaagattgaactattacatccttcggtttgttatagtatttagttatgcacctgctggaatttagatcgatcggaaagttgtagctagcacatggtatcatttttttatctttacgccgagtggagactctccacttgggagatgagtgggatgattcatattggacgagtcgataaaggagagataacctttgaaaaaggggaaaatcatggatgacacgtagaccgtcgtccgtagagtgtacggtgtacaatgctgtcctactgtgttaggatgttatacaaatccaaatatccttggtgctccgttctagaccggaggatgaatgcacaagccagtctaatcacgttctagaaagaaaacccgcccggaaaacgcacttaatagccggtaaatccacgtatatcctagcgctgtttcatccaagccgagttcgcttggatccggcaaatcacagcgatctctctagtcgatcgtcgtttgtggcggctgggcatggaaggcgagagcgaacattcggatcatatacgattcctgataactagaatagaatatagaatcctgtgctccgtattacctcgggcctagacaccccgtaccaaggatttgcaagttgacaggtggctactccgtatttgatcgtgatatactccgtcggaggacgggagtaccttggaaggccctcggtactgaagactcggtccgggtcccactagactaggaactccgtacaagttaagttacaatgtggctaagctgaagagatggagtggaggaaatgcagtgctattgccacaagcttggattaatatcggcggttccctagctttatttataaataatacacccaggccagaaatccagagttggaacattcttgttcggcgaagttttcctctccacttctattacgtatgtccactctaacgctgcaaaccgggtcatgatgcactgacgatctcttggacaagtgtttcggatatgagatatgaagaagggcagacgggacataaatagaagcacactgcctgtgcgtaggagggtagacggagtgatatagatagaaaaaggaaaaaagaaaggtatgcagggtggaatgtttccttggtatagcgatcggtggtctaccagtcaggccatggcagtggagaagaatcggattaggaaaaaaggcaataaaatacttgattgtatgttgttgtggtatactgtggttacttgtacggagtgtgatatacgtagattatcgaacggggttttacaggctatgtttataggcggtttatcggctgtttatataggcgtaggcacaacataactagttaacacaacccgatcgctaaagatgatccagatgatctgtcaacacaaatgacatcgatctcatttaataattcaaatcccagaaaatagaaatcaggatccaccggatacgtcgggactcgacatactccgatgaggataaatgtaggatagcaggatagtacctggagagcccgtgactgtggagatcccccttctcctcttctctctttctctctctcccctgtcgacttcgtcttttcctccattcattttgtttctttcttttcttgtgattttgttatgcagtcgaaatgtgttgacaccctacaacttttgcagcgttaaagtgggggacaaataagacgacatttcatattagattcttcaaccctctaggtgatcgacaattcacttcggtcggcccacacacactcaacttcgatcttccctcgacgcctgggacctcactgtcgcttaccctctcacccctcgggcgcgggacaataaacagatatcaacggaccttccggtttgatgggaaattctcgatcgagcacacccaccatgaaggtcgcggtagtggtctcggtttttgctcttctggctcggccattcgtatcggcctcatccgacctggcctactgtgctacagagaacacggggtcttctttcacgggaggttagtgatcgcaaccgttctatatagatttagccacatcgctgactcggcacacagtttctaacacatttcaatcgaatggattatgtgaaactacctgcaccgattacgcttttgctatcctccaagggagtaaatgctggtgctcgaacgtggctcccgccaagtcctcactagccgacgacacttcggactgtgatggtgcatgcccgggttatcccgcagacagttgtggaagcacatccaaaggagtgtacgcctacgtggaagtggtcggcaacgatgcgactagcacagccgctggtacaacaacttcgaaaaccacctcgtcaacctcaacctcgaccaaatcaacatcaacctctacctcaacgacctcggtaagccaatcctctttgttttgacactgttttctcttttgggcatatcttgggcacactgggcatatcttgtttcctgtttttgtaccgataaacctcctgccagcctagctagcctgattgggtgtttgactctctcttcgcttgtgggtctaatatcggggatagagtactagcgacccgcctgtaacggtcactgtgactgcctccgattccactaccacttccactaccacttcgacctcacccattgtatctacagcacaaccggtttgaccagtggcacgtttagctaactttttctcctagtcaacttcctcggatgataaaacaacaacttccttgccgacggtctcagtgcagaccaactctggcggccaagtcaagaccatcaccgtttctggtgcaagtgcaacttctggcgctgattccgcatcgcctagcaccaccactagcagcaagtcgaaattgagtggaggttccatcgcaggcgttgtgattggcgtcctcggaggactcgctctggttggtgctctcatcttcttgattttcttctaccgcaaacgcgctcgttccgtcagccctatcccaagccaagacatggcagacgacagaagcaggggatcgagtttcatgggaggtttcttcccgcgaagcgataacggatctctgccctcacgtacgggcacaacatttaccgatcggcgaatgaagaccaacacggtcctctacccgaacggtcatcgggacagcagtgtttcactgcaagacaacgaagactactcgcgtcctgttcttcgggtaagttgaacataacacttagtcccggcggaacattcttgctaatatcattctagcttaccaaccccgactaaatttggaatgaccattttcctcgaccactttctttcgcttccatcgtccgcgcctctcactctccattaatctccagccactccaaaacagcctcattatgatacccacttgtcgctcaatttctttctctatcttcccttctattcttatgggtgcagctgtggagaatacacggaacagcaacatgtgactccgggcggcctctactccgccaaggaacagttatgagggtgcattgacattcctccaaacacactagaaggacacggaaaaataagagcccaagtcctgaattcaaatctatggttaatcccccggccactcgagacgcccttcacgagccatcacatacattatcctgcatacatacccgccacatcggcgacgatgccagcccatgccgacatgttctgaaagtatacatacatcaccgtctttcggttgcgtctgacatcgccagcctctgggctcgtcgctctcttggcttcttatcttttctcttatttgttcccaatatgcttattagctttgcttgttttctcttcatttgtcatgtaacacccagcctcttttgtcgctgcccccgtcttaattgttcgtgcatttgctatggcttcgatctgaggggatacgtccccggcgctgtgcttagactgaccgattcaatgaaactactatatgcttgggataggatttggtgattacgttctgggattgtatgtttattgcggagcggagcgaagcaattatagaatacttgtatcaaagttatacataaagccgtacctaaacttgagaagggtaagaaatatgtatagaaagacaaacaataaggctgcataagcggacgaccaaagtttcttgtgcctatatacttcaaacgtgaaggtaaatgactaccggttggcatacttcgtcgccgtaaaggcataaatgccagatcattcattccagggggcaattgtgatgcaaatatacgatctaagggacagaagaggtaatcaagcaatgtgcaatgtgtaaaatatatggatgatgacctaaatagctactgccatgaaactctctgagtagcttcacgcagacaaagtcacaaaagacctcctcctctggaaaccaggagaatcatcttctgcaagatgaatccaatcctgccctgccaagggaagcttcagtctttctcacagagcaacttcacgacctccaagcttccatccgaacggcgcacataagcgtctcagtatattgcgcacactacggcgaatgagcatacggacaatgtcaacttcccaagctgagattgccaccagaatctcacggcctcctatatacttccctggggcaagttcggcgttactgttccgcatcaagcgcgcaagttcaaaatgacgattttgaaaaccagtgagcagagtagcatctatcgatttatctagggacttgggatcggcatctgcctcgataaattccctggcaatatccatgcagcggagtctcaccccttatcgagatctttgttatagtctcatttgtaaggtgaggagccaccttcgggaagaactgacaatcattgcgcccggccagagcatgtgccaccgtatccctgttcgaggccgcttgattcaaatccaagcctgcgttcatacaaacctgcatgacttgccagctagcccaacgagctgtatataataagcgaagccagcaaccttggcgccgccggaaaaggcacgaagcagcgccaaatcggtccagcacataaagtcgtcatagggtgcgttgcggtacttgaagtgcacataggaagggtcagcaccgtattccaggagtaaagttaccatcctaggttggttggcagcaaccgccacatgcagcatgaatccaccagtaaggctgtaaatgttagggtcgacgcccgaacgcatgtatttcgtcacgatgtcaatatccccgcgcttaatggcacgcgcgaagatctcgcttcagtgcggcccctttgagaatcggaagtcgtaaccccagagtgaccatattggcatgtcgattccggcaattgcatttggagaattccattcccagtcttgtccctcgtattcttgcctaaggggtaggacttgcgcagtcagtcgtcttttctccgtgacactatccgcgaggagcgagtgtaaatgcttgcaggtttggtgaagcatacagcggtcccggataagcgccgcatttgcaatcgccagaactaactcctcgggcaaattgcctagcctgaaggtgcctaggggcaggctggggcttgtaggtttagacatggtgcaatttggcggtggacttggtgacaagggttcttgtcgaattttgaatgtagacgtcaagccttctgcgaggatgttgatgtaacttttatgcaagaaaaacggttaatcatgagagctgtataaataattccaaagtgttggctccatgctgagcaggcttaatggactttaagagatgccacagagacctaacacaatctgtatttcattagctagggtttctctttgttctttctgtcgtgatatcaatgatatcaatgaatagatgcatcttttggctctgtcatctatagcttgtttcacaaaggagaaaaatgagagagaaagggaaccatgagttttcttgtgttcgctggcaaggaagatcaaacaaggtatgggcaacctgaggcatggatggtctcaacaaaaggccagacatccaaaacaacaataggtcctactgaggacaattccgacggaaacaaaggaccgagcgtgtcgtccttcaactagatacttgccacttgtagatactttggatcaataacatccgcatatcatgccgtattctaacccctgaaacgaaacttgatcgtataaccgataaaatatatgcttttctccgtggtggcagttgtcaccgtggcacgaatagatgcatcatatgccgagtgttccgcgaagcgctagtaccaaagtactgctcgtaaaatattcaaaacacagtcaagctcaatcaaatgaatcaggattgccttgcacaggtatctatctagactgctgctgccttgttgatgcgcaccttccctaacttgactctgcgagccaaatacaagaaatatatagttctcggaacaataccggcaatattggtgaagcgctttctattattattgaggcgcaaatatgactgataattaagcttttcacataaatggacggagatttaatctcaatgcagctatatgcacctatttagatagaataatatctgccgccgcttttatagccctggctcagtgagtgcgccgggaccatttaggcatagatctcagcgcgaacctcaatggaactgcacctacccgcagttccagctccgagatgcagttcagattcaaatcttagatcctgaggttcttcaaaatagaacaaacaaaagaaatctgcttatccttgtgatttacatgaatcatgtagaccctggcagtgcttcgtatttctttttatttcagaaggatcggcagtaaggcaactagagtagcttggaggaaatgcgtggagaaggcaaaagaaaaagacccatggattgagcttggctgctagctaagcgagagaaaggaagaccaatccagggagggagcaaaagtcctagttatccacccccaggcaaaaagctgactcaacaacctgctcatagcataaaggcctagaactgagacctaagctaaccttgaaatgagatcggtgatgcatttggtcccaaaggcggcttgccgtgaggagtaaataatataacctagcgagtcataaatatcttcacccactagacaacgcatggcgcttgataatcatgatttattaccgcaataggatgcatgtgacattggaaggattttattgtgggataggacgtatatagagtttaagaagagtgaggaaagtacgacactgattgagcgcctacaccgagtactttctgtgaaaataaaggggcgcacgcctcgtacaaatcatctcagtggatatataagggcaagaggcgtgggagagaattaatcgtaatttccacaaatgggaggaagcaagtaacaagataagtgatgacttttgcccacgttccatgtgtttctgcttagacgttgccaataatagataaataatagcgtgaaagacaaggatcccaattccggctttctggctactcaacccctaaacagaaattggcagtactagaggcagacttggcgagtggagatatccattgtcgttgtgaaagccgagatttagggttaaaagtacggtaccatggaaggaagcgggacatcccgcgcgtgtcaaacggacggattgtggggccccggcatgtccccggcactgggatcgaatggcattcggaggaccgttacgaagttatgaagtgtcacaaccacactagcgagtcattgcccagcccaggccctagaatgtactttttgacttgaatagcaacggctccccctatacggagcacaccgacactgagctttctttgggactgaatttagtttcatgtccgcggatcatcaccagtccgagcaccttggatagatcaaaaacaaaatctgtcatacaaaggagtcttcgtcattaaatagctgaaatatacatatggagtggtccacccggattgccaggatatacatcttcaggtcgcagggctgtgtcattctttcgtgatttccccccacacgcaagaccgcaaaaatgcctagcatcactgctacaggtgactttggcccagcaccggccggggtagatctggcgaaaaatcagacaggcaacttgttgggagcggttattcctgtagcggtgttcgggaccatcgcagttatattgcgattagttgcgccaatgaagaacaaagaggccagaaaattagctctcgatgactacctaatcgttgcagctcttatattctcttggggcacagcgatatcctgctttataagtgagtcaagatgagttaaatggatggcacatcacttacaccagattccctaggcattccatatggtaacggttaccatttacaatccttgaacaaagcggagtttattactgtttggaaggtaaggaaaataccgaacgaggtgcttgggatagactctaaccaaacattcagatactttttgcctatgtgatgatttacgccacagctatcaccttcaccaaatcctcgatcgtcttcttctacggccgcatcttcaactttcgctggtcactaggcttctgcatgttcttggtgcttggatattgggtcaccattatcgtcacagttgcagtggcatgtcgaccactgccatatttctggctggcctatactgatccaacagccgttggtgtatgcattgatgtgcccaaattcttcttcggcaatggaattgctgctatgttgattgatgtgattatactgtgtatgccaatgccaacaatttacaagttgcagatgcaatcgtcgcagaagctagcagtcgtgggaatcttgctcctagggagtttgtacgttcttctcctctcctactatatcattgatccgggctaatcaacctcagtgtttgcgtcgcaagtatttgccggatcatctcgcttcagaacaacacccacggaacagacgctacgtggactatggcaccggtctttatctggtcgtccgtggagcctttcgttggtatcatctgcgcgtgcctccctacctttgggccattctttcgtcggtggtggtccaaggctcggacagggcgctcatcaaacagccgcaacaccccaagtggcgagaatgcatctgcatctccttccacgacctggctccggaaaccccgagccaaaaagccacccatggactcactattcaacatcaatgaatttagctgtgtagatgaagttgaattaatgaacgatatcagtggcccccgatcgctgagggacgaggctgtgagtgatcatcatgatgtggagcgaggagacccttgtgctatcacagtccatcaggaggtggatgtgacatgggataagtataaaacacgcaaataatgctgatctgccttcaatggggagtccctgggctttgtgtattgcagtttgagacgcatcacattcgagaaatgtacgatatgaaataaaacgtgccattggcacatataccgtcctggcaagcggaattgagataataaaagaaaccttaacttctcgcacaaaacaaatgggaagcataactatgcagaaatacacgtgcactaatactccgagcgttgtaacaggtacgttgggggtcggttcattgttctccaaggacccttcaacgcaggaccgtttttagcgtgaacccaaatttgcgcttcatttcgaaacttggcgtgataggcggcgccatgtgccaattgaaaggggtaagaattatggaaattatggagagagttactactccgtactttgtactccgcacgtccgactagtttccccgtgctggtgtggagataagctgtctagtgggtttgccaatagccaacgacttcttctcaattgacgctatataccttcagaaacctactccgtgtacaaaagtacagagtaacagcctagaccaaatgtgttccccaaagccaaaactgagggggaaaaaagaaatcaccccatatgccccctaacttctcatttcctctaatctataaagcgggagctatcgtagcattgtaatagaaattcacaaacagtttagtcttcaaacccctcaatatgcctgaccttactgcaaatgggttaacacctgctacccgcgtggctaacggcgagacccctcccaattgggtcccttgcgccgagcaacctgcctttgcgcgacggaaactaaagataatctgtatcggcgcgggttactcgggtttgacacttgcccacaagatcgatcatgagctgaagctcggcgatgtcgtggatttcaagatctacgagaagaatccccaggtcggcggaacctggttcgagaatacctatcctggtgttgcttggtgagtagtctatacttccaataaacatactttattttctaacatatctagtgatgtcccggctcgtaagactcctcggtggctctttggaaaccaaaattgacattcatttagatgcatacacattcttattcgaacctaacccaacctggtcccaattctatgcacctggtcccgagattgaggaatacattcaacgaacaacgaagaaatggaacctggacaaagacgttcagtttaacactcgtgttactgagaccgtgtgggacgaggagttgggaaaatggaaagtggtggtagaccaaaatggtacaatcacgcatgacgaggctgatattctggtcaatgcgtccggtttcttgaagtgagaatcagttatcctcgacatttctactcttattaacggcgagtttcctgctagcaaaaccaactggcccaatattgagggcctgtcgagtttcaagggcaagttgattcacacttcgacttggtaagtaaatgttatctatgaacccaaacaaatattaacaaccggtatagggataacacctacgactgggaaaacaagcgcgtcgcagtcattggtaatggctcttccggaatccaatgcgtggctgcaatgcagccgaaggttgccagacttgtcaactttgtgcgcagtccgacctgggtctctgtcaacttttgcgcggagatgacagcaagtggaggcaatttcaccttcacagaagaggagaaaaagaagttcgaggaagatcccgaggctcatttcaagtaccgaagagggttggagaacaggtaagttcaaagtccactccccgacagaggtcagaactaagtcaattccgagtaaagtgtcaatgcgttcttctttggtatgtataaaggccacccgatgcaattgggcttgacacaggcttctgcggatcaaatggcggagcgaatgaagggaatctccgacccagaagttgtgtcaaagatgctttctcatgatttccgtcctggctgccgtcgcttgtcgccaggagatgggtatctggaggctttccacaaggacaatgcgactctcacctttgatccgatcgaaagtatcacagaacatggtatcaagacatcgaaaggtgacgagcaagaatttgatgtgatcgtctgtgccacagggttcgacacgtcctttattccatcttggaagctggttggccgcaatggagccagattggaagagcgatggaaagtcaaccccgaggccttctttgcggtccaagtggagtcaatgccgaactactttatcttcaacgggccgaattgccctatctcccatggctcgcttttgaccgaggtctcttggacatgtgattacattcttcgctgggcgaaaaggattgctgaacatgatatcaagtgagttattgtggtcttcgtaggtccagtcgtatgactaacatatctcgcacaggtcaattgatgtcaaaaaggaagccatggaagactacaacgtttggtgccaggagttcctcaagcgtacggtctggtcggatgagtgtcggagctggtacaaaaacggaaagagcaaaggccaagtcactggagtatacccaggcacgattttgcacttcaaagactgcctcgaaaacatcggcggggagcacttcaatgttgactaccgctctaagaaccggttccgatgcttaggtaacggcgaaagtgtgcgtgatctgaatggagcaggtgatttggcgtggtacatggacgatttgaaagtcaccacaccaccactccaagtcaacggcaccaacggcaccaatggcaccaatggcacaaacggcacagtttgacctatgtcaagatactttttactatttaccgttgctatactctgtatttcactcaataaattgtatattctttttctcgaaagcggaaacccacagcacttacctcatttccttcaatttccgatctggtagtatgtgtctaccacatcatccttcgagtcgccttgagatacactctttccagccacactccgaatacgtgtacctgtagggggcgctggtgctggcggcaacatatcgagcactacgtcgaattgatcaggcacacaggactgacgttcagtcacaaaccgcaaaagtccccatacagcatgtcgagacattctagttacttgcgggacaatatggaatgggcgaggctccgggcggaccgtaaatgtttgcgcagggccactctcagggtggtggatgactacagccttcctgactgggggcattggaatgggtataccgaacctataaggcccatcgatctcctgaactctagcctggatttcatcccaggtcttccgatagtgagtttcgaaggtactcgtccactcctcgtcagagcgatagccggcgagaccagcgcacaaagaccataagaaatagttagtgttggtccatgtggaaatacaaaccgcccatgacctggaaggaagattgtgcttctgacgaacgtcacagcggattactggttgctcggtggcttgcacgacggcaatgggtacaccgtggatcgggtgaacagcctgccagttgtagttagctgacatgattcctgaatttgttctttctaggaggggaaagggttagacttgtaagttgtacttgaccactggaataaagggatcgcaagccctagagccagattactggaatagtgaagctggcggagcacttgatgcctatctaatttagagcaacgggggctttatatagcttttggagagtgggtttttattctatggtaaagaacaaagaaaaggacctttgtcttccatcaaagaggagacctgagacatccaaaaaaagcacgttgtcaacggatatttgtctccttattagaagatgcgagtaacaaggattctttgtctgatagtctctttgttctttttcgggtagactgatatttttctctagaatcaccacaatgtgccagtggcttggggcaacaatcgaagaaggtatttagataacaaagcatgcgcggtaaagagcatgattggtcaatgcgggtcaatgcaagaccgccccaaggttgatctgcagattatcgccaagccttggactgtcaacggcgcatggtatggccatgtttcgctgtggcttccaaggcttctcaatagtgatgcatctgtagtggttgcattatttttttttcatttatgaaagaatagtgcttgtaataagaggaaaatcaaagggaagctatcttctcatggaaacaaagaaggtggaatgggaaagaaaaggaaaaaaaagagataaaggcaagaacaaccggagttgaaccggaacagtccaggtagtggaagatcttaggcacttccctcgtggtacatgtaatgttaccactaggccacctgctgttgggtcttgagtagtacattgatgttccttttctcttgcaatttttgaagctttgcttatgcatatacattatctctaggtaagtcacctatgtgcatgtctaaatgaatagtataggtcacatgtagttctcgacattttgattgaattccgaagactgcgattatcaggatatagctaagtctagttcaatgagattgaatttgaggatttagtctattgttatataatgtcacgattgagatgtttactatgtagagaagacttggaagcaacgttgggagtaaggtaggccgggacgatgcacttgttgtatggttgacggcggaccgagcgccaaggcggttaaccttaaaataaagtggagacatggtctgtgcacgggcgcatgccaagattttcactgtcaaagaatcttgacgccaaagtcaagacctaatacataatgacacctaaaatcgtaagatcagctgatggcctactggtcggctaagtcccgagacggcagtccctggacctgggttttttctagtactgtgtcctggaactgggtgctaatgttgctatccgtaggctcggtaaattcaaaagacctcctcgatcttgcttgatctgccacgtgttacgatccaacgttttccttccttcgccttttttcttgtttgctagtttgcattagctagattgtttgctacatagtttagcgagatgattcgaagtttgcattgtttacaaagcggtcaggacacagctataagaactagctgtctcccactttgcaacttgcttccttcctctctctctatcttagttattgtgttcaatgcactctttgttgaaaagacctggcacgtcacaccgcgcgttcaattgaaatcgtgtaatcctgactttgcaaggcatcatcacggcccagagatttatggaaatcggcctggaggaatgaacgaaaaattggggtgtgtgaaattggggtcctgcaccctgctcataacctgtttcttgaccgcttggatacggcctggcacagagagacgggttagggggtactctcccccgcgcccttcggcctcgagagccaagtagcctggggcatatagctcaacatcacttgtccactgctgtcggtcacagaggaacattgagtttggaagttggttagcgtccttggcttgacagagaatatcgacgatcggtaggtagtttattgggctggtaggtcaaaggatactcacggcggattttggtgtctataagcaccccgagcatgcttgatatccccaaaacctgaccaattcacgaaggcgctcaagtatggcattcgcatattgaacgggcggacttcaacagattctttcacagtcccgttgatttcaaactcgacaattgtcaggcccggttctcagacctagttcatcaaccaacatatacgggcctaaataaccgagatagagtactttgccagtatgtgtaagataaatagaccgaagtctgcggtctcaagatccgcccagggcagataatcctctattgatggatcgttagtagttgctggattaaggatagcctccgatggcatataattatcgagtagacagtgcccagtctcgatatcatagttatacaacaggatcgcgaatttcacccatcgcgctcgatttgcaggatgggtctcatcaacaggggcaagagaaatcaggccgttaatatcgattggctgaagagtatcgtagagacgttctaatgcttcggctgggtatcgaagaccttaaatgggttcatttatattcgatcttggcccctctgtacctggaagacccataggtgcacgcgattggtacgcctgaataagggcaaaaaaaaaaaatttgttagttcaatggacttcggagatttggaccgagtggaattcacatcacgaaattcctgtgtagccgaagcccatttttccaccagttgccggcggtggtataactcatatctctcatcataggaggaacctgcgtttgctacagaaacccaattctcctggatgcatgttagcgcataacttaaagacgtggttgtttgaaaattcgaatgctctaagaacatacctgtacaaatagtaaccagcccttgacttcctctttgatctagtccagagataaatctgtttctgggtgtggttggatggaagtggggattccccctagccagtgctgaacggatctcggcatcatgtgtgtgatcaagttaggggtccaaaggtccaaggaacaaatgaatcaattaaatcaacgctggagggaacagaagagaactttggccatgtactagtgaaagcttcactagcggggcgcctaactaggttgggacgaagccgaactgaacatcgtagcgaacatcgtagcggatgttggaatgaacgactactttacattccttataactatcctagaatcatggaactattcaaccaaagaaacaatgccatggagcaatcacgtatcaaccgcctagaatccctgctgccgatgccacttttcctgccaacccttgaaccatggactatcatccaaagtagagacctcccaatctttcggaactaatccattctccttctgctcgtctgcccattccttcagcctaggaattacaacatgctgcacatgccaaacgcccttgtaatccatgaggttcttctttccctccctaagaagcttcaacaccaaacccggtacgccaggctcatcgcggaattccgtgactagagtaaaaagccctttgaaattgaaaaccaccgcaccggacaagggtagacgcctgagggtttgccagtctacccgcaggtgacactcgtcaatggccaagtcagcccgctgggattgccgattcatttcgtgagggtgcccgggtggcacgtacaatggctgtccaatttctatgccccaagagcctcgctgaattggtttctcagtcggcatcttggtgaaaaatctaaaccaagctcttttgttagcacttcgatgatattcaatcttctctaggaataagaccgacataccgatccattgagaactgcatcttctccttatagtccggaatcggctcgtggatttcatgcaactgcttcccaacctttgtcgcgacattccaccccatcgccgagcagatcaccgccgcgcgcaggaaatagaatcccgtcgtgtcgtcacgaagcataattgcgaagtcttctggtacgttgtccagaagaacttcgagaggcggcttggctgtgacatcctgctcggtaccgagaatcctgttttgcagcacgcgtttgtccaccagtgtgaagtactgcgggtatcgggcgcagatgaactgcaagaccatctccatcagctccttgcatgcaagttcggagcctggcatggaatcaaggacttcctttccattcttagcgtacagttccttgcgctgggcgatgcggctcttgtacgtgttttcgagctcgatccaccagtctgtttctagtttggtcaaggctgtttttgaacggagcacgagattagtttcaaatcatgattgttccgctttctacgagacatacacatggtttggtgatacgcccatcggaatggacgatatggccgaggcagggctttgtcgatgttgaattcgggatatgggcttgggagtggaactccactgagagtcgcatagtctggaaagtcccctagttgcttgacttcggccacggaaaatcccatcggtgtgtacttgtcgctcgggctggtcatatagtcggcgctcatgggtagaatgttccgacgcacttcttcttcgtgcacgtcgcgtctgggtgtagcatcgcaattaagatctgcaagtgtgtgtctgcgttggggtgggagaacattgtcatagctagatggggaagttgggcttgttgcagctttcttttccggagagaaagaccgcggtggagtttgagaagttgaatgttttcgaccacgcagtttaactctagccaggagagatctgccaaatgtccgattaatgacagcgtaggctccagtggcagctagaaggatgaatccaactcgccagagattctccagagtccacaggaagttcataacggctcaatccatacaagttagggcaaactgcagatggatggggattctgattcagtatataaaacttataccagcacagttgcaaaggggaggctttgcgaatgtattgagctatggacggacagggtccacagagtataaatactctccgggtcaactgtgggcaaaacatattcggatcttgtcgcacttggatgagggatgtccgatgcggggatgacattcgtatccagccagagtgacaagagatacgcgttggatagctgctttagtcctctggctcgattggatttgccgtgttaggagaggaaacgctggcggtcgatgccatgtcgacgtcacaggcggtttattgaaagtggtgttatgcttatcatgttacattttccagatgtccttatcatatattctacctcgtacgtaagatatgtaggtgcatacggtgcatgtagatcagttacgcaggtttgtcgaatttacacactagagaggtgcaaaatggcattgttcggaggtgatagtctagctgtcaactcactccctacgctgctcaatacagatagaaccccagaggcgatgtcttggatgaattggttctgcaaacaaacaagaaaagataagaagggaacaagtatactgaaggggaagcccttgtattgcccaaaagggtaaaaatgtcccgaggcttggcggcagatgactgtctgattatgggggaagcacctgtggacagcgcacagcactggccacttagacaaaactcactataacccgacgtgttagtcttgtctttctggcaacctctaccccttctctggagttatattttttgtacactgaaagtcatattggactcagtcttctggttcacagggactgattcgctcatccagcaaatccaagtcctccagttgtgatcgcggcggcagcttccagagactggtaccacagacacggtctttcgtgagaagatcgtcgatgaactgatccatatatgtaagcgtgaaagtgtcgcgcacccgtcgcttcagtttccgataatcgagaagtagtggttccagggttttgtagacatcgaccgggtcgaaggtcagtcgcacgtagaaagctgcaagagcgcgcagatatttgaagtcgcctcgctctttgacaagagcatcatctggatcttctgcctcgtcgccactaccggggtcggtgtagttgagtagttcgaggatgacctctcggtcaggcccgagctggaggagcttgaatgcaaggcaaaggaagggtgtcggtttctcagagacaccgtatgttccaccaatggaggtcaattcgactgcgcgatcacacagagtcgctgcgttcaaaccgaagcactgttccttccagtagtatgagtcggtgatgcggtcgcgcacagctttctcgaagagcgtggcggggttgacgccacggaccagggggcccttgtagccgcggttatcgaggaacgagctggcatcggcacgatgggctgccattgtggaggtgagagcggatgcggaagtgccaaggcatcaaagagaaatgaaaagggccacggctgtttttttgcgaccatcgcgataatgcggatttggaggataccgccttcatcaccgccttcatcaccgcgacagatcccgccaaaggtcttgtcatcgtaacattgctctatcattggtttcatttgaatcgctagcaggaatcatgtccatccatcatgatctagatgggcctccggatgatcactgtctggctaaaaataaacatcttggtcaaccaacaatgttgttgtactgacaccgccaagaccacgcttatcgatagtcgcgtggacaacgtaaacaacctgatgtcatgaaacaagctaacaagcccaacaataaccttggaaaacatgcttggggattgatagtccagggttgttatatttgaacatcatcccgggggccatgcatgtctgaaattctaattttgccttatcacattctcattattcatcccatgcagcctcccttgtggccatggttcttttaacatcctccacagtttcggccattgtgtcgatgggagtgatctgcatatttactgcattgttatttttctctggatatgtcctacagcagcaatctgtcaagagcatccagcatgctttgaagccccaggaagctgcccaaaaggccaggtacaggacgggccccgcattccagaagccactaaaacgaggtctatcagatacggggtatggggccgatgaagatataccaatcattgggagtcaacccaactacgactcgtctggaaactatgcctatctccaaatgctatccgaaccagatccatcagacatctgctctgcaatcctcttcttcaaacaactctctacaaaaggaacagccatccaggaccgcctcttcatgtacccagagcaatgggaccggatgtcagccaagacactgggcccatccgccactaaagtattatcaatattacgcgccgccagcgccaaatacaatatctggctcctcccaatcgacatgtcagcagctacagctgcaggctactcaacaacaaacagcaagctgctccacctgggccagatccagttcatgcagtatgacagcgtgctctatgttcaaacaccgggtctgttattagacaccggcaagttggatgacatgctcctggctcggcccctgcctctccgccacgacaagaaccgcccagagtcctataacaatgaggcgtggattcctatgccgcttcgtgcaaaccgcgaggcagatctcccgcctgtctatctcattactgtcaataacatcgagaacgggaatgttgaggcaaggactcatgttcccaatcttgcgttgcctggttttggtagtcttgtggttgggcctcggggagctgcaaaagcgttgaaatcagcagatgctgatcagcctggttatgtctatttcgatagcgatcgtgatggacatgttaagtgggctaacaatccctactttggcacttggcgagctcagcaagctgaagtttgtgagggattggacttggacgaagtccttcatgatgagcgatgatctttcggtttttatatgacatggacttgtacatgttgtaaatataaaaggaactggcgttggtgttgtatatatttacatgacaattgtctcaagtgcaggatttgggtttggggcttttgggtacaaattttactgtctattttggttcaatatatcaatctcgcgccttcggatttcaagtcatgatattcgttcattatgtgtcactatgattcattaaatgtatgcttctgcatttccatcttacacagcttttcctattgcggcacaccgatctcgtaaccaaggaggacttcagtggtgtttccttcccagccccggttaccgctggtagagatcatgtaacggcatgcattatcgatatacagctgggagatagttccagtccgatgaccaggaatgatcaggaacggaactggcgaatggcgagaagactggtcgccttgctcgttttggagatcgtagagacggaggatatcgtgagaggcactgtagataagggaggttagaaaagaagttctgcattgtctcatggtcctttactcaccagacaagatgacgcccattcggcatggccttgagtgctgtcaccggcccactcccctgtgggaatttgaacgttcgttcggcagttctcaaacccttgtggagactgtattcctcaacagtgccattccggcgtccggcatagatgtagtttccgtcgggggaccaacaagcattcatacaccatggaggagaattatagggggtgatgcgagcgacaggatcaggctgtcgccggtcccaaactcggattgttccatcgattgaagcagccaggaacgtgttatcacttgtcacaccgtgctcttgttgggtattttgtgagaagtctggggctggtgggggtgtctcgagatcctctgctttagggagtccattgacaagaggttgcactgcgccagtcgggatgtccgcatcgtccatttccatttccgttttctggactggctcatccgtgtgagtatttgtttggttcgacaatgtattctgcgtgtcttgtacatatcccatgtctagttgagcagatatttcatcatcaacttctcctggcgcgtcgacatcctgcatagcaccgttggctacagctttgccaaactcgtcgtcctcatctaccccaaatactcccccggatggctcaccaccatcagcggctccgccatccgcatcaccaaataacgagtccgctccgccaaatagtgagtctgccggggatcccgcctgcgggttctcaaccgggcccgagtctccattgtcgtgagaggtatccatgaagttgaaattgtctgtaccaggcgcatcatagtttgatgaatatgtgccattggtctgttgcgcttcgattgtgtcctgggggactggaagggtggactctggccgaatctgcaaagcagatatttgtccaccgctaccaccgaaagcccgtcgaggttgaccagtattcagatcccaatcaaaaactcgtttatcccagcccccggagagcaatgattcttcatctgatgtgagattcagggaggacactgcagaagtatgttgccgcagaagcgcaatttccttgccctcttcgtggcgcagagtttgcagacggattaccccagattctaacccggaaagcatccataatccttcgctatggcaggccaaagagtacaccggtgacaactgggcgccatccatgttctcccagtatgtcatcaggactccagctttgaccacactatccacgaagggatgcctttgcgccacggttaacatgagcttgctgtttattgagtccgcccagttgaactttcgcacgaatccatccgatccaccggtgaagacccaacgcatatccgctgtcgctgtaacggtattgatcgaggtcgcatgcggtgcggcggtggttgggatcacatcgtaggttcgggctgtgaggcattcagggcgcacacttgggtggtaaatggagaacggttccaacacggagctgtcgccattgctatttgtgttttgttgaatggcagggccttccgacgcctggctcgcgttcgaagggctatcgggatcctgatccccgtccccgtcttggtcattttcattatcgccttcgccatcgtcgacgtcgcgcattgtgtcgtccatatcgttctcattctcgttatcagagcttccgtcctgggagcctagggaaccgcgagggtgattagcaaggttgagatcgatcggctagcggaccattgggacaaagaattgtcataccgcccatgtcacggtcctcttcttcctccattgaagccatgattaccgcgcctctcgtggcagtccgagttgtggggtagctatcgtttgcgcgcagcaattcaaacagggtggaagtttcggacaaacagctccgacacaaaggcaaatgagactaaggctaatggcggtgagattgagattatgccctagctccagagtacaagaacagagagagggagcgttgtgaagtccgcggcttaaaatggaccaaccttccgcggtgggaatgggtccgatgcttgacggaccaatgagcgtcaagagctactatatacaatctatcacatcaatttacattctatcctgcacaatagactgtatataattaacaaacttgctactatgttatatatacatatgtagtatatatgtaggatgttttttgtgatatagaacattcataatattgaggtttgactatataatgtaatcttatatgttagctgcacatcgggaatgcatttcttatacaacactactaggtagtaggcagtgggtatacaatatatcagatatagcaagcattgtctaaactttggtttgcctctctcttaaaaaatatactcccttttagtcgccttcaatcgcttctcactcatgcctcacttagtttcatacacaatccatcgtatgtccacctaatgcgtccagatccgcgcggcctgatagataatattcggcgctggatttaaccccccacgcttgatgccacactctcttctactccttctcatcctacgcattctttagacaatcatgtcccactttcgctttcagtatggtcatagacccaaggaacaggtcagaccggttaatcctgagatccgccagtacttcgacccagatctaccagtctacggcccttggaagctttggcaaactaagcccgagcttccttcgaccgaagagatcctcgggacagacgtatcaggagatattgtcgctcttacccccaattgcatttcggagccttgggtctccaaggagaaatacctagaggcccattatgcattgatccgggaagactcagttgcaccacttcgaaatgccgtggctcgggttcgcgctgatccttttatgaaggatactcaggatatctccatctatgagaaggtgagtactgctctgtcgttggaatttcttggatttggatagtactgaccatctctttacatcaaaggtcttcattatcggtgttaccctagcccgagcgggtttggcgttgcacatccaattctcaactcgtcgtgcgggcaagaatattgcctggacatactctaaccgtcttaatcctggaacactcgtcgcccttacccccaagcgcaatgcattcttgagcaaatgtgttgtcgccgtcgtagcttgtcggctgctggaatcggttgagaaagaccccccagaggtcgatctcttcttggcctcacccgaggatatcgaggttgatccacagtgagcaatactatggttcagtggttttgaaagatataacaatactgactagtatatctcaggcaagaatggatcatggttgaggctcgagcgggatattttgaagcaaatcgacacaccttgacagcactgcagaagttgtcaaaggaaaggtcagcggcaaatcgtatctcccttattgaaatttacctgaccttatctagtttcccgttgaacgaacaaatctgcagcctggaggaagacattgatgcaccaggatacatcaacaccgcgccatccatggacttctcgccattgtccgaagtctctggactcgatgtcacgaacaaatacgacatcctcgagagatggccctcccagccaatgggaaagctagatgcatcccagtggtcagccctgaaccgaatgttgactaaaaagctggccatcatccagggtccccctggaacgggcaaaacctttacctccctcgctgctctgaggatgatgctctcgaacaaagggcccaaggatccaccgataatcatcgccgctcaaaccaaccatgctctagatcaacttatcaagcatatctcggtgttcgagaagaactatgtccggctgggtggaagaacttccgatcctgagattcgcaagcacactccttatgagatcagacagaaccagggtctattgacaattgaggggggcttgatggctccaatgagaaagaaacagaacaaactcgcggctgagcttgagaaggtcctaaagccacttgcgccatcaaacagcaacaagccccttgcagtatctctatttctggagcatggtcttttgagccaagagcaagttgattccttgaaggaagctgcacacaaatggcagcgatccaacactcctgcaaatgccgatcctttggcggcttggctttcagactgcgtgaaggagtttgactccgaatacgccggtgactttgggttcatcgatgatgatattgacctggagtatgagcaactcaaagagatcgaagtcgaacacggaagatatgaggatgactggtcgtctttcaaaacacgctattaccccttgtcgggtggtctttgcagctccaacaccgccaaagtctctcgggcaacagttgaaaatctgctaaaagagaaggacttttacaaaatccacaagaggtatcgcggtgctgtctatggctacctacgtgagcagctgatggttatcctgggagaaaatgtgcagcgcctcgctcaaacctacaaaaaatgcgcctccaattttcaaattggtaggtttgaacgggactactgtattctccaggaggcgaagatcattggaatgaccaccactggtctgagcaaatacagaggactggtctcgagtttgaaaccccgagtcatcttgatcgaagaggcagcagaagtacttgaggccccagttgcagtcgcttgtcttccgtcacttcagcatcttatccttgttggtgatcaccagcagcttaagggtcaatgtgcggactatgaactgtgcgggcaccctttctacctcgatgtctctatgtttgagcgtctgatgataaacaaaatgccatacgccatgcttcaagagcagagacgaatggtgccagaaatcagagagctcgtggcccccatctatgggaatcttcttcatgaccatccgtctgttggagatcacccttttgttcctggcatgggagacaagcgatcattctttttcgaccacactgcgcatgaaagcaacgacagtctgctatccaaggtgaatgactttgaggcatcaatggtggtcaatcttcttgcctacctggtgatgaacaaagtcccggcatccagtatcactgtcctgactttctacaatggccaacggaaattgatcatgcgaaagaaggcacagaatcccaacgtcgccaaaccatacgtcaatatagtgaccgtcgactcataccaaggagaagagaacgatatcgtcatcctctcgcttgttcgatccaatgatcatcgaggtatcggctttctcgcgcaggacaatagagtttgtgtcgccttgtcgcgcgccaaatacggtctttacatatttggcaatgcacgatgtgttagcaaacacagtgagttttggtatgcagttactaatgtgatgtcggagaaaaaagaagaccctcgtatcggcccggctctgcctctgtactgcacacgacacaaccaagaaaccctcatcgagagtgagtccctgtcctgcctagtgatatcaacggaagagatgatctaaccgtttttctagctctcaaggactggaacaccatcggtgacggctgcgacaagccttgtggcacgaatttaccatgcggacatccatgtccccgcaaatgccacgggtaagtttcgcgaataatgacagtttccatgcacccaatactgacatcttgactcattagttccgaacacgactgggtctcctgcaaacagcgctgccgtgaaattcgcgagtgctgtaacacgttctgcatttgtgtgtgctctccaccacacactcacgattgcttctgcggtatgggcaaggacaacaaaacccagatcttcgacggcggatccgactgggatgatgtcgatggcgaagaagatgatcgcgacgaaaaggtcggccccatcccccggacccgagccccaacccgtgcctccgcctctgcctctgtctctgcctccaccgcagaagatacagctcgttgcgccgagggtgtacgccaatggcaggcgtttgcgcgtggtggtggcgtgttggatgattatcgtcgggctgggcttgacgctagcgggaaacgtcctcagaaagatgctattccagttgaacagaacgtggttgctccggttcaaggcactcttatcgacttcgacgatgatgccgatgatgccgatgatggtcaggttgaagttctgggtgcaggggaagacgccctggctgagaggggcatcttcgcacgtgatagtgatggtcaggtcgaagctatgagtgaagtacaagacacgcctcctactctcgacaatgacttgataaacttcgaagaggatgatgatggctaccaagctgaaggtgtgagtcaaccgataatgcggcttccttcgatgcggcttccttctatgttagtcgaagtttcgcttacttccagggtcgaggaagtcgcggcgtctccatttgggggggatctgatcgagctttcctagatgggcggcaggcgtcactttgctatggtttttgcttttgctgggagggtagctcagtgaatgaactggggaatcaggaagataatgggaagaggatgatggaaacagaggaaatgatgattcgggatagcagaaaaatataaaagcacaaaaaaacacaaaaaaggcgacgatcaaagtcgcccacctcatgagttcatgaatacattattttccagagactccaatatatacaaacgccaaacccatagatatgtaatgtcaacatcaaatcatacttatatactcttccaagctctgcccaagaacattaataaacggccactgagtattcgttccaaacaacctagcccacagcttaagaacggccaatcccaaagaagccggttccagatctggcggcgcctcgaagtcatctgtatcaatagacgaatacgcttcttcgatgatacagcgggtccagcgtaggatacgactttcgttttctgcagcattgttagccggtaaatcatgcagcaggatatggacataccactcaacgactgatccggtcccgcctcggcaagggtaaacagccatttgcttagcaacactgtacattctatactggctagcgagtgccgcacgctccagaagaaggcttgactacgagcaatgtggtctatgcccagacgcacggggatgctgagagcatgagcggcgtatatgagtgccgggatgagacggtagctgcgttctgggcgtggggagtgacagagtgctgtggctattattatcgggtcgcgggtctcaaggcggcgatgaggtccgagatttagagataggcggacgtaagcgagtcctaggaatgcactggaggtgaatgggattggaccgttttcgttgtgtgggtctagactggattctggggcttgttgccatacagaggtccaagaacggagagctcgtctatgggttgaatcgttagaagtgagtctaggaaggtttatgggtagaagacttactctagtttattcagttcctctgttgggagagttgtggaatggtttccgttcggtaatgataactcgctcacgagatggattcgttgcaggagtccgtgtaagaggatatagttacccaatggagccgggatggggtctagtggtttggctgatcgggacttttgcaagaggagggtcaatgcgtcttggaagaacaactgctggggacctcgttcttgctgggctgcttcccattccgcggcggtgcttgcagtccattcaatggtagaacacggaagacgcaggtgtatctcattgctgcgcaaagatggataagcattgtatgcgacactgtgaacatggataaagcagaacgcaatcaactttgtgcgtcgcgccgattcttggtccgcccattcgtaccagtcgaggggtgcgcgtgggtcagagcgtgttgtgtcttctgtcaagccagcctcacggagatgtcgaaccagcaagccctgaaggtggaatgcttcttgtaccagtctggcattttcccacgtggagtagcccatcagaataaggagacagcgggtaatttcgatctgcttccaaccagcagtagtttccgctgttacctgcggttgcgtgagggattgatcgccaaaagtggaataaggagatatccccagcggtactcgagggcctgaattgtaccctggcttagctgggaaatggggctctctggccattcgttcaaatagaactgccttggaaacgtggaataatctttctgcgttgcggtgctcaaatctatactgggctccgatcgtcatgatagcaagaaccacctcaggggcacgttcattgatatagaaagtcgggatatggataaacggaagatgtgggtggaatccttcaaaataggaagtaagataccgagtcaatgtgtgacgagatggcagtgcgaaatccggaatcacatggcgaaattcttcgagagatgctgcaagacgaaaccgctgctcttcggtgacattgaatcgtgacggtggtctcttcgcgtttgggggcggttctagaatgttgtcagtgatctacagagtgatagcaatacaaggtgtcatataccagaatcagacagggttccaaggctttggtcgcccctgggcacagatggaagccaggatctgaatggtgagtcgcctcgagaaccatctccacttcgtcgtggccgctcatgctcttgggtctgtcgacccgtttctcttacgtcttccaggttaacctcttgtgtttgagaggtttcaccttcactgggaacccattccccaggcaagccaatcgaatccaagaaatgtgtgaattcctggaaatgatttagatcttcgggcaagtagggcatcggttgtcctattttgtgtcagattaatagatttcttataatggcagtcaagcgaaagaccaggatattgcatattgcatattgcacagaacattaggagggatacttgaacgacaaagaaaacaacgtacctgtaggtcgataatcgcctggaagaagcagctgggcagcttgaagcatatccggatcatgcaccatacccgtatggggatcaatggctgggtttgggactcctgcagtagcagcgggaagcatgccggcctgatgcgggtctaaataaggcgtattctgtgccccagcccattggtgcacagccgatgaccctgcaagggattcgacgggtacgggccgagttggtgtatcatattgcggcgggatagctgcagggtgatgcgttggctggaaatccgccttggtttgctcgggcggcgtcggcgaagtcagcccatcttgatgtgagatgcgcgtatgacgctttaacagatcccttctagtaaaggccgccccacagaagcaaataaacggcttctccttggtgtctattttaccgggttagcattagctgtggggatttccccgggttttgcttacgggtgcgaatgtgtcgctccaaatgttcagtccgccggaaactccgaccgcagtgtatacatatacgtgcccttgctccacgggcacccctgtgcggctggggtgatggagacattgaagggggtatggagaactggtttggagaagaaaaggccctggttgagcaagtggatgtcgagatgggagattcgaccccaactcctccaactcggggcccgccgggacgttcggcccgcgataagcgataagggaagatttggagatgctcggcagaagtatagaggcatggagttgttaatgtcatattcagatgtttatcgctgttttatcctattggaatggtctaataactcctgaatacgtttcctggggttgtggtaggtggtcacgtcacatagtggctcgttacttcatcatcctacttactccgtacatactgtcattcttcaaatgtcctactataaagtactctaacaaaccagtacatgtctactttgtagtgtatggatttcacgttggatacaacatctaccctaaatctaccgaacgtcctcgaggaagctcaataggaaatccacaataccatcctgattcccatattctagtgcgatcaatcgttagaggaaaagacgttcatatagaaatatagaatttggtgttaaaagttaaataacaaagctgtcaaatcctcaaaatacaatctcactggacttctaattgcacatctcggcattgtggagttcacaagagcagcgataacggaaccttggaatgtcgtaaatcgagaaacggaactcatcgcgtaaatgagcaagtcagcagtggaattgtctgtcagttggagaatgccgggatgaggggcttatcttccccgccttcttttggtccggtttaaaagtcaacctcccctggcaatttccctcccaattttgaacaatcattcaataatggcaccaaagcgagttctcattacctacggtgtagatgttgatgctgtagccggttggctaggctcgtatggtggcgaggattccacaaacgacatcagccggggtaggtttcaatgttcttttctacattctgctcgctaacaatcaattaggatactgggcagggacagttggaacccaacgattgttgaaactgttcaagaaatacgatatcaagtcaacatggttcatccccggccactccctcgagaccttcccggaggacatggccgcagtccgggacgcgggccacgagatcggcctgcacgggtattcccacgagaacccgacggacatgtctctagagcagcagcgtgacgtgctggacaaaacataccggatgttgaccgagttcgctggaaagcctcctcgaggaagcgtggcaccctggtacgagtcttgaatttagatttagcaatggtgctaatcagatacaataggtgggaaactagcaaagaaggagcccagctcctccttgactacggcatcgagtacgaccacagcatgagccacgaggactgccaggcttactacctccgaaccggcgacacctggactaagatcgattacaagcagaaagctgaaacgtggatgaagcctcttgagcatggatccgaaacagggcttgttgagatcccgtccaactggtatattgacgatctaccgccgatgatgttcatcaaggacgcgcccaacagtcatggttatgtcaacccgcgggacattgaggatatctggcgcgaccattttgactacttctaccgcgagtacgatgagtttattttcccaattactatccacccggatgtgtcgggaagacctcacgtgctgctgatgcatgaaaggtatgatgtgatcataaatttgtgcagagtagggctgacattcgataggcttattgagcatttcaaaaagcacgagggtgttgaattcgtgacaatggaacaggtttgcgacgacttcaagaataagaacgctcctccgcctggggccttgatgcccgctaaggctggtgcgatgttggagaagtgaacatatcatctgaggtattaacagtatattatcacagcctcttagttggactacaaaatctatcaatgagaatagcatttgctcgtgtcaatagtttatcccgaggtccgttgtggtcaaccatcaaatgacattaccccaaatcaatatacggagctatcagcgctaagataactagagctatcggatagttaaactgattcgaagatctatggatggatctccacgtctctattatcagaaatgtctaccccaacatagataactgtatcctatgtaccccaactatatataccccaaatcaagtgctgtgcaaccacccaatcatactctatcgcggacaaggcaggtcattgataggccgattgatacaaatatcacaggtgtatgtctacggcgatctatatgattgtcgcggcgtcgagtataatcggcgtgtcgataacgtccaatgctccgttgctgcattttgtctgggctgtcaagttctaccgatcgggaagatggccattaatacggatgcaaaatcgcgcaagttctcatatatcgggcggctcacgtagcttggactagaaatggttatgcataagtcgaaagaccacccgaaggctagatatcttaacgtagcatgagcttggtaaccgccccctatccttcagcctagagataagcacctctagatagatcgtgtcggcggtgaaaccataaactgatcgcgtacggcatcatgcttcgagacctgatcatcggtaaacagcgtgtgtgcagcctatctgcagggtattgccagtggttagctgccgtgcacaacgggatcttggcttggcgtatgtcttggcgcaggtgggaagcttgtactattgcgccactagcgcttagccttgacaagaatgtaaatccgtgctccgtctatcgtaggtcattggaggaataatgaggaagttcatgacctccgctgtcgggtcggcaaaatttgcagagttatcaacgaggggaagttccacgggtgcgttagaccatgatctattggctggcattacagcgctatacacggctggacggatagacccttaaaatgagaaagataagggcctagaatgatgctaaagcagactaaaccggactaaaaagtaccataaagtgtgcgaggacctccgtttccgtttccgagtgtgaatccacgtgctcctctttgttcttgttatctcttaactagttcccatttccttctcacttactcttcttcttcttctgtatacctcatatcctcttgtccagacgaaaaagcgcgttgatcttatcaaatttccaccgcgcgtctacgttatcaccgggtctatcagaagatggcccgcaaactggccctgctggtcatattaatgcacgcaatccaaatcctcgctcttcctactccctacgaaaactcgatcgcattcaaatccgttctgtctggcattacacaaaacaatcgccactacttcccagaaaccatccccgatcaagatgagctcatagtcatgctgaaggagacagccatgcgtgaagcaggcttcgtgctctcgtcaaacccggacccgcaatcaaaggagcataaaacggagacggagcttcacaaatcacttccgaatccgtatgcagcgatcggcacggatgcaacggcaaaaccacaaccgaatagctacccaaagccgagacaatccaagtccaagtccgagtcccgtgtgaaggagtctttcgtggtcgcattaggatcatacaattacccgatctactggccgccatttgggttcttcgttatcgcggctgcggttgtgtgtttctgtacgatactgcgggggatccgcgcgaagaagtgaagaatgcgacatgtgactgtcggattaatatttatgttgaaagactttcttttttctttattcgcttctctacggagagaagcgagggattgattctaccaaggctatgcggttacccgttcagccttgggagctctatcctttctccactcggtcggaggcttgtttgattacggtgggactccaggccccgttccattgaatcgaatcgaccctatccccgataagcgatttgaaatacgccgcgaccgatggggcaattctagcgctgagatcagagccggatgtatatcctggatgactcgggcaatactccgtgacgaatcgttcgaatgttcgtgatccgaccacctttcccgtcccaactcgcgacgagcatacgacgagcaatgcgaatgccagtcgaggagatatcgaagatggcatctggaacttgccgaagaagaagcagcttgggtgttgaagaagtggcaggcatgttcagattgagggtgggattttcatccctacatgcctcctgtgtcaaatgactacatatttgttctgaatacaaatactttgatgaatgctacactaaaaggaaaaactacaaacttacctagcacatggcccatagtagtaatggtataccacaagtaatattgcaagcattttcattctctaccagaaacataaattccgacatgtgccaccaagaatagacgtaaggttacaagaagaactcggaaatgatgtgatagcaggtacatgcgcgaagcagaaaagaggacaaaaaagacaagaaagcaaccgaagacgccacaccggtgcgagagtaagaagccagagcagaaccatgataacattggaacagatgataatgatgataaagcctcccggccaggaaatgatgattacatttgtgtctctctcgctctcttttttgcatccccgccccgaggaatgagcggggggtaaaccaataacaggtagtagatgaagtagggggtaacaatgaatatgtacgcgagagattctatagatagggaaaggaaagaagaagggagccggtgctttaacaatcaccgacaagacgcttctgcgtccaagcgcgttgggctccgtctagaagaacgtccatgttgccgctgttctcgcacatgccgcggaagacgccgtcttctttgttaatgagggtccaggggtggtcgtactcgacaacgcggccgtggtcaaggacaaggactttgtcgtagtcgatgatggtctgcagtcggtgtgcgattgtgatgattgtgctgttgctcaattcgcggagggtctcttggatcttggcgtcggtggcgtagtcgatggatgcggttgcttcatccatcatcaagacgcgggggttcttgagcaaggcgcgggcgaggcagaggagctggcgctggccttgggagaggttggagccggactccgagacttggctgtccaggttgtggaagacgtttttattatcgactactgtcactgcgctgctgttcacgccgctgccgttgatttccgtcgcggtgcgactgcttgaggttgtgggggttgcggtgcctgaggtgctggaaccgataaggtgcacgcgacggagagctgtgaaaatctgttcgtcactgaagagaccgaagggatcgaggttgctgcggagggttccggtgaacagggtcggatcctgggggacaatggtgattgactggcgcaggtcccgcagtccgattgacccgatgtcaacgccgtcaatgatgatctgacccttctcggcctcgagaccgcggaagagagccagcgcgagagaactcttgccagcaccggtgcgaccgacaatgccgaccttttcggcagcctttacagagaacgaaacgtccttgagaaccgggtccagatcgggtcggtaccgagtagtgtagttaatgaactcgaccgcaccttggctgggccaatcagacgcaggtcgtgagtcttcgatgacagaagctgcttcctggtccacattaaggtattctctgacacgctcgacagagttcatgttttgctggacctcggagtacagacgcacaagccaaaggacattctctgtgaatgtgacggcgtaggtcagggaaagaccggcagcaccagcatcgatcgttccaacgttcaataacacaaaggtagccgagaagaacgagactagagcaccggtccaatcaacacggagggcgagccagcggttgctagcccagaggtagatgtgtggccggttgtaggcattgatgcggcggtggttgtcgaccatgaagcgaggaccatcaccataagcacgaatggtgacgataccgttcagggtctcaccgaactgctggtacaagggactgcgctggacagattccagacgcttgaggtctcgcgaagagttcaaataaacagcaccgagggcagtgtacaccaaagtgatgaacacaccggcaatcaagaatcctggcgtgatccacgaaatcagaatgacaatcataatcacagatgccagactgtggagcatgccgatagcaacaggagcgacttcctgatcgacagactcaacatccttggagaaccggttcatcagttgaccaagaggcgtggagtcaaagaatctgaactttgcgtgcatgactgccctgagaaggcgatcatgaatcttccatgatgcatggagcgaaccccagaacagaacagcttcccgagacaaagagattgcgatatagaggaatcccaggagcgcatagacacccaggtaataagccacgttcacctccccatcagagttgccggaagagcttgcgccaaattggggcagaccccagctgctcatgcgcccaacacttccaatgctgaaggtagggggtttgagatgggccgcggcggcgtactttccgacgtcctcggcactatccttggacgtatggtaagaattcgcccactgtctgatccagatgttggtggaaacagaacccaattgctgcaagacgaatacaacaacagcaccaacccaatagtaccacgggcccatggcacggaggtacatggtgacagtcgaccacttgacactaccagtagccttagattcagtgagtttggccttgtcttctacctttccatttggagtgccgttcaaatcttcatcatccgattcatggttcgatggggcacgggagagtccacgagagctgggtcgggaattgggtcgagacttgaggaactcatcgcccaatgcaccagtagcggcgacatcgttgggacggccctgggcggaaattctgccgtgctcaagtaccacaacgtgatccgattgggggacagtcaaagcaacgttatgggttaccaaaatacatgtgcggttgaacatcagagggccggtaagagcttggcggaagatgtgcttggcggtatgagagtcgacagcagagagacagtcatctagcagcaagtggcggccactgctgtagatagcgcgggcaagagagattcgctgcttctggccaccagacaaactaatgcccttctcgccaacaagagtttgatcaccagcatcaaggatagcgaggtcacgttccagggcgcaggccttcagcaccgcacggtagcgacgttcatcatagggagaggcgaagatgatgttttcctttacagtgtcgttgaccaaccaggcttcctgggcacagtaagcaatgctgtcaaccagaccagtttcagggtccactgggagatctgccctgttgggcattccaccgggaagatgaacacgaccctcgagaagtttcatttctccaagcaaagccatgagcagggaggtctttccagatccagtcgggccaacaatgatgttaagcttgccgacaaggaattcaacgtcgacattgatcagacggaaagcctccaagtcggcatcagcctcggtatcttgggaatccccactggagctgttccaagatagcgttgccttttcaagaccaatcctggcaggtgttcctgtgacagtactatcacggagctgatcgtatttgcttgtttcctcctcgttcaagtacttgtccacacgatctagagaaaccttacattcctgaacgtgtgccaccatatccgcgagctggtccaagggtacccgcagcaaagagaacatggacaaggcagggaaagcgatcgaaggggtcagttgttttttctcgacaacagtatacaagaagaaggacatgaacgtgatgagaataggcgtgccgtaccagacggttgcggcggaggaccagaggatgtatcgcttgcgcagggctttcagttcggtcttgcgcttctcgccgacaatgtcttggaaccgctgctcccaagcaaagtacttgatgatgcggatgttttggaggacttcgttagtggcgtgaatacgggcatcggtgcccttcaaaatctgattctggaccttgttgaactggcgggcgataacaaggttgataggcagcatgagcgccatcaaagcgataccggcaaatgagctgaaacccatgatgtggtagagcagaataatcgccattgtaatctgcactggcacactagcccacaagaagtggagataggcaccgacctcgctcaccttgaacgaatcgatcgccatcaagttgataattgtgccaacattggcctgtgtaggttcctccgcaattgtctctggcttgttgccagcctcggcatcatttccattggcggcctgcttcttgcgaccaaaggaaaagagctttttcttcttattcttgattggatcttctacgggtttcttgacctccagtgaagcgcctgccttgcggcgaagagccttggcataaatttcaccaataatgatcgcacggattttcacgcccatcttacgaccaataaataaggcctgtccatctgcgacaccctgaaccgcggcgcaacagaagagcagaatggcgaacaaccaagccgcgctgggtgtggtcgaccgaggatcttcgacgtactcgaggatggccttgaggagtagactaggcatgaaaacgaatagattggcgaagactgtccaggcaccctgctttagaattgtccccataaagtaccggatgagcttccatgccaaagagcctttcatttgtctcttgcggaattctctaagcacgtgcgcagccttctgagacggggtcaggttccaaacatcctcaatctccaggggttggcgataacccttcatgaccaaaggatcgagccaggcaaatgtcgcaagagataacaaactggccatggggtatgttggaggctccaagccatcttcgcgttcaaccagaactggcttattgcctcggcgagtggtgagcgcaatgagcagcaacaccgtactcagagcgaactgaatgctgctgaaaatcagggcttgctgggacacggggtggataatggcggatcggaagaccatgatgttgaacaaccattggaagctgtacagaatcgctgtatgggtccagattctcggcgcagaggaaaggtccatggtcgataggaggaaacggaccagcaccaagaaaaggatgtaggcccacgacacaagcccagccacggcggggagggttccatgtcggccccagccgtgagtcgacaaaacggcgatatagaccccaacttgagcaattaaagctgcgatctcgagtagtacaacggtgatctctccacgcgggcgattgacctcgacaatctgagcttgttcttgttgtacagcttggaacaacatcgtatcggactcgttttcctgcgatgcactggggacctcatcttccgagtcattgttcgggagaaccttgtaagcgacacctttttgagtgaggatatatcgatgagcgaggcggattaggatcaccagcagcgaagtgccgcagactgtgaggggaagtatgacctgaagaacgctattaagatacctcatgatcagcataaaatttcaacgatcggaattgccatcggtgtagacacacttgcgctggaagcaacgagacaggtcgtcaatggcccagacggggccttgacattgcggtaacatgttgaccgggaagctcgcagaaactgaagctctcggacctcgcgcgactcgatcacacagcttttcagctggcgacagtgatgaatgggtaaaggcgaccggtattcggttattgtgaactacccctttagcaacaagacttgactgaaatgctggacaaggctagcattgcaaagtcgaggtgaacagtgacgctgggataagggttccgggaccgagtgccgttgaggcaaaagagtaggcggggaaggctactcagattctgccgagcaagaatcaccgaagatgttcacgagggtgttgagatatggatctaggggcgggggaagaatcagagagtgaaaatgccaaatgttccaaaaccggcggtggacggtgaacggactccggtaaagggtgacattagccaccaccaaggtttggtggtggagtgaggtaccttatacccaattaacagtattttctgcatacggagtttttatcacaatgccattattgacttaactccttcgggagcccgatgggcaataattcctgcaatgtctcaaagtattcatctgacctgtctcaatcagcttatcgtgctccactataaaaggtatcgattttatatggagttacaacgaactcactacaatatgtatagaagatgtccaagtattcaatcaaaatacgtacaattcagtatgtatcagtggtttatccactcttcctcctcataaacgcctcatggtaggggttcatcttaagccaagcgtctggattgaaaacgcgaccagaatcgagataacggagttttgttgaggctttgctacatgccagctattcttcttttgacaagggcgttgctcacctttaggtatacacaaataatgagcttcggcggcggctttgctactgtctacaccctccaggtaatagtcattctgactcattcaacagccgtgagatcttttgcattaagtgcgtatttagcatgaatgatgaaccattcgaaactaaataggtcagcaggttttatcttgaactgagaagcagaaccgttggtagaacagtaggggagctcgatgacgaatcaatcacatcactacttacctacccctagagacatgtctctttgaatcttgttatatgtatacaaagcgataaaaagcataaatcatacagtactttactaaacatgatcagagatatctgataggaaaaggcctctcgagaagagtcactcggttgccttggggtatcgctgcaaccatccctccctggtgaatcgctgcccgtgcgtagcgagaagagcttcaattttcgcttgcagttctttatgtcattgtaagtcagtacttgtacttgtattagtagaccatattattagtaccttcgactgtcatctccttccgggcttgtagagagtaatggtcgcgaaattcgtggacaagaatgaggtcgtcagggagatgggttcctgttcagctcagtcaatactgcgtagggggaaagtcttcgaatgacccaagagaaacagaccagccataatagcatatatgtaaatagtgagaccaccccaggctttgacagtgcgaacgaggttctgctgtgtcctagagttggggcgcatggaagccccattaggaactgagatagattagcgacgtgagctgatcgttttgactatcatgaattacattcataagtggctgggttgagagccttcggttgtacttttcctgcagttgtaagaagatcgaatacgccgtgtggtcgtcgtggacctggccaagctcggagccggatggaggtgcctgagttaacgcggaatatatccttgggaaaccgagtgaaggattgaatgaatctgttatgcgacatcttgatatatccttgcagggatcaggcgagggtgtatcgagggttgaggtaagatagcaaagttgcgaacttagcaaccccgggaaggtcacctgcaagggcaatcacatcactgctacggagtatacacgaattattctgtagttaaaaaagagatgagtattactatacaccccataaccccattttttactttctacacacctttctaaactacggagtacttcgatattcatttcctgagtctatttttagagattactacttaagagtgtggacaagaataactatataacatctaacaaagacagttaagcattaatttaggtatgagaatcaggaattcaagcattaagagttcgacttatgaatcgatataggaattaccacattgtatactccgtagacctgaggtggcgggcatagtggataaacgcccctcttagtcaggttgccactgaaatttcaggcatccgttgatctaatcagcatcggcctcgcctccccgtgatcccggcattgcctacggttttataattcattccgctttaacttcaatttgctccatttgcataaggcacatggtgctgcctcggcgtcgtatagctatataaggtagattgctcccttacaattacgagcggaatctctccaggtgcaactcttcagatcccgcttatctcgtcatggcggagcgcatcctcatgaacgaattcaagacccttctcaaagagaagtgggttaacgttcaggtcagtttaccacttcacaatcgcctttgacacttccacacttgcaggttattgacatactttgtgtagttgcacgatgacgacatcttcaactgggatgttgccctgatcgtgatcaacccggactcgatgtactacggcggctacttcaaagccgcaatgtcattcccctccaactatccgtatgccccaccaagtatgacacctcctctcctccttctcatcttcaaaataactgacgagattcttcttaccattagagttccgcttcctgcagcccatcaaccacccgaacatctacaccaatggcaaactatgcatatccatcctccacgcgcccggcgaagatgaaatgtccggcgagcttgcctcagagcgctggtctcccgctcagcgcgtcgagtcggtcctgatctccatcatctctctgcttgacgatgccgagacttcctcccccgcgaacgtcgacgctgccgtcttgctccgcaaagacccagaagcctaccgccagcttgtcaaggccgatgtcgagaagtctaagctcgatattcccgccggcttcgagatgccaacacatgatactcccgtccgtgagcccgtggagaaggaagacgatgacttctgggccgatagcgatgccgacagcgacgtgttcggtggcagtgactctgaggatgaactcgtcatggaacagtccagcggcagtgatatggaggaggacgaggatgagtcggccgacgatgattccacggagacaaagaaggtgtgatgataactttctgcgtctttcgtctggggaattgttgcatgatcagccatttcaggtctgcttctctgagcattttcagcattctcggcgtgcccttgtcatctttcatacgataggcgtttagcgggatcattttcgaacattatgggtcttatggtttatgataacatgcaataccctaatgttgcacagatattttaacgaatcaaatcaaattctaacatcaagatcgactctaaatctctatcacatctctatcacactttcaccctacctacgtccttacttcagttcagccaagccataaatcttctttgcccagcgaaagtggactctcctccgcctccccacagtgcccccacctataaacccaagcatttacggttccaatatatgacaactaacttatccaaatatcatatctaggtatatctacttacccactgaacccaaccaatcccaagatggcaacccaaaacctcgccacctggacagtctccctgtcctatcccgacctcccaggggaagtaatcgacgcggccgtccgaagcttctacaacatagccgggtgcatagtaggcggcagtcaacacatcgcaacaagcacagcccgcaaagccctatcccccttcgcaggcccaccaacctcccacctcccgggcacaagcacctccacagacgccatgcacgcagccctcttcaacggaatcgcctcgcacgtccacgactacgatgacacccacctggacacagtcatccacccaacggggccggtagcatgtgccctcctcgccatcctcccgacgctcccgcgccccgtttccggaccggagtttataaccgctctggtggccggtatcgaagccgagtgtaaggttggcctggccgtttggccggcgcactacgatgtcgggtggcatatcacgtcgacgactgggtcgattggtgcggcggtggcggtggcgaagttgcttgcgttgtcggcggaacaggtcgcgcatgcgattggtctggctgctacgcaggtcaccgggctccgggagatgtttgggtcacatgcgaagtcgttccatcccgggcgagcggcgcagaatgggttgcttgccgctttgcttgcgcgggaggggtttacgagttcggttcaggcgttggaggcgaagagggggtgggcgaatgttgtttgtgccggcgggaatcggattgaggaggaggttgcggcgctagggggtggggggcgctgggagactgtgaggaatgcgtttaagccgtttccttgtgggattgtggttcatcctgttattgacgggtgtgtttggttgcatggggagttggggcgggttggggttgatgcggcggatgttgaggaggttgttgcgagtgtgcatccgcttgttctggagttgacggggaagacggcgccgaaggatgggctggaggcgaagtttagtgtttatcatggtggcgccgtggggttgttattagggaaggctacgccggcgcagtatgaggatgatgttgtacttgatacgcgggttgtggcactgagggatcggttcagggcggtttctgatgagagtttgcgggctgatgagtgtcatctcgttgtgaaggtgaggggagggactaccatcgagaagcatgtcgactatgccgtgggtagcttggagcgccccatgaccaatgaacagctgacagcaaagttcattgagcagtgtgttggggttctaggagaagagcggactgacaaggcgagtcagtggtgttgggcgttgaaagaacaggccaacgtggctcaaatcaaagatgtgctgtagattgactatatgttggtacctgcatatacttactaagagtttaatgaacctagttatcttacagtgtcactgtgtaatgccggacaaatattggtttgataaatcaacacgtattctatatcagtccgaacttatggttgtagacaagtatgctacgtgaagcaacaaaatagcaaaatagcaaaaacaatctgtgtataggagcgtaatagcggtataaacccgcggattcgtgttggagaatccaaaaaaccgagataaaaccaaagaaaatatgttgtacgcctgtgttaatccattcatccatgcccaagttgttgggtttgtcgcagacagaaccctaacaacgttctaatctatgcagagacagcatccttgatctcgctgtagatagcgccaagctccttgtggaaagccttctcggcgttatcgatgatgctgccaatgcgctcctcaacactggtctcatcctggtgggccttgtagccacccttggcaagaatctgagtgaagttggcggagccaccaccgttccaggccagaagctaatatagagttagcctaatccatgcttttctagatatggtgggaaacttacgttgggggtgtcggagggaatgtcagtgagtgtgccctcggtggcgacgctgataagagcagccttgagctgcttaggggtcacatcggcgacggcaaaggcagagtccttggcgggtgccagggagacgtagtaggccagcagaccggcgatgtgaggggaggccatggaggtaccggaaatggtgttggtggcatgctcgctgccaacccaggtagagaggatgttcagaccgggagcgaagatgtcagtgcacttgccgtagttggagaagtaagcacgctcatcagccagagtggaggcgccaacagtgacggccttctcagcagcagcgggggagtagttgcaggcatcagcgttgtcgttaccggcagcaacggcaaagtgaataccagcgtcaacagcggcattgacagcgagatccagggtgcgagagctaccaccgccgagagacatgttggcaacactgcccttgaacttcttatcgcccttcttggacttcttgatgtgagcctcggccgcccattcaacacccttgacgacatcggacatagtacccgagccgttagagcgaagaaccttgacagcgtagacgttggccttcttggcgacaccgaacttcttgccggcgatagtaccagagcagtgagttccgtgaccgtttccatcctcatcggcatcaccctggggaatggtctggccccaggtagcacggccctcgaagtcaacgtgcttgatgttggtgccagtatcaataacgtaagcatcgacaccctcgccaccctcctcagcatacaagtacttgttgaagttgccgaaggagaggctctcacggtgagagatacgggcaagaccccagggggcgttcttctcaacagtaccctcggtcatggtacggacttcagagtccttctcgatgtaatcaacctgttttgagttatattagccgccgaactagggaacttccgcgagggaatgggattactcacatcaggatgacggcggatctgctcaatgacatcctcgtggaagtgaccagcatatcccatgagtgatccagcaacatggaaagtgtgcttcaggcccatgaaagcctccaagtcggcatcgaacacggagcgcttcttcagctccatccgaccggtatgagcggtgtgcacctcctgcaaccagctctggtgagcggacgcagtgctttggtcaacatgctccttgaacacaatgatgtaggaatccgggatatcctttgcagtcatggaggagaggataggagctgcctcattgtggatggagcctacttgcacgggcgaggcagctaccaacaacgggagcagtgtcaggctgaggaagcctttcatgatgggcaaagtgaaagattaaacacggcggaaggaacaggtgatggagaaacgatagttgtaggtggtaaaggatgagtgaaggataggttggatggagaggagaaggagaagatgaggagaagggcaggcttatctagggaggagacggaggatcgatgatgcaagcgggcattacatacgatacggttacgccggcggatgacctgtcgctgtcgatctagtggagaacatctgagaatggggtacccgatacggtatggtatggtcaccgtggtctcgggaacctcaggagcatccacttgacttgccatagcatctatatcagacttagcatcatatgaaggacgatttaagtgggttggatatcttccggccactataataagtaaatatacggtagctatagcaaggtagtgcagatggtcatcttccccccgggtacctggcagtatcatgctgctataggctataggcaacccccctcgcacggcccagtttctccaaggcaactcatcctccgaagtcgcgtgctttgtgttcggatgactcaaagggttgggcgaatcccccttgtcttgcatgaaagtgccattattggatacaacttggccaatctgcggagaagccatcacatcataggatcaccactcccaagcttctccacatagctcatagctgcgtcttatcgcgcttatcacgtcctatcggtgatcgcccgtaattttgaaaggttaccgtttttacaatacaataacagggctgtgtccagccccgtccagcccccgttccccaagggcaccgagtcacctgatatccaactctcccctcccccgatagcgaattacagcggtcgccgaatatctggcatggggttctgcggatgacgagtgcagcaaattttcctaaccgccaggcttcctattttggcacgagcactgtcacacaccaatgcagaccgttgtacccgatattgaacattcacggtctctgatggtcatacgccatcggagcggacgtggataagatttggctatggctccgtcggctcccctccaccctcccttcccttccgaatcaaccgatcgattggccgaagagctagccccaaccattgaacagctcaagagcgtcggtgcaggcaccgcgatcactctgcctcaggctctatcgacgaccgaatctcttctccgcctccgccacaccttcatagatgatgcacatccacgcaccgccaaagatgcattccgacacctccagggctttcaaacgctgctggcactggcggaccaggtagccgagctctacgatccggtacacaggtccaaggaggaacggaaaggcctgttggatatcttcaaagatgtcctcggggtattggcagagggcttgaaggaccattttggaaacaagcgatattttgctcggaagatagtagggggaggtattgctgctctggagcgaactctggctgtgctagtcaaaaagatagacacaactgagggtgacgcgcatcatctctacggcgccattttggccgcagctctatgccaggagacagtgtcgggtatttttgtaacactgagcaccaagtttccgcaggataaggactctccttccccagaagacgtccaggatgctgtggatcattgcattggatcagccgagacagtggaagtcccggaactacttggaccgttccttcgtgtgtggttgatgcactcctctttgtcggctggatatgacatcttacgcctggccttacccgcatgtctttgccaattggcttcgcagtctcggaggaatgtcgtagccttgcatgccactgatatgctcacctcaatcctaccccttttattcgatggtagacggtcagacaaggagaaagcgatttaccaacatcttactcaatctctcagcgtcctgggaatgagtatggacgatgctggcttcttataccgcggagcgcatggcaacccacaagttctaaaagtgctattgtctgctcttaaatcctctaaggagcccccatcaatacagttcgatatgtctcgtcatggatactgttcagtcgagttcgcaacacttggtcggccatttcctcctatcaattcctccggctacactcttgcagcctgggcccgttttgacgagttcgatcccaacacgcatactactatctttggagcgtttgatgcaagccaggcatgttttattcttgcctacctcgaaaaggatactcggaactttattcttcaaacttcgattcgaggttcccgtcctagtgttcggttcaagtctgcaaaattcgagccgaatcgctggtaccatatttgtgttgttcaaaaaagaccgaaaccaatgtcttcttcccgcgcatctcttttcatagacggcgagtttgttgaacaactgaagatcgaatacccttccgttcctgtaagtcatcagtcaagcaagccatcgcgcgtgcaggcattctttggcacccctcaagatctagcaatgcgactcggaaaaggcgtgtccacttcccgatggtctcttgccaatggaatgcttttcgacgaggcttatagcgatgacatggtagctgttttctacaacctcgggccccggtattatgggaatttccaggattgcttgggctccttccagacatacaaggcctccgcaactctcaacctgcggaatgaacatcttcacccaggtaaagaggaagcctcggacattgtcactgccatccgtagacgagcaagtacattgattcgcgaaagctcgattttgatcaatgtctcttctgtcgccgttcttgatgacgacgatagcaataatgtcgacgaatcacagttgataaaatgtctctcacggcaggcagcaaagagtctgcatcagctaacaaagtcgggtggcaatgccgttgctctcaacggcgccactccggctatcaatgacggcttaacacagcctcagggggtaggtatcctgactggtgatcctgtcgttgcggtacctagggcgatggatgacgctagttggtgtctaggtggctgcgctgcggcccatctaagcttgatcaaggcggccagcaccgcggacggcacccgcatggccgtggaagctctctatgaagcagtgcgggacaactggagaaacagcgaggctatggaaagagagaatggctatggtattcttgcagtcttattgcgggagaagcttggattctgcatgggcaattctccgaccgcgtttaaaatccccgtggttacctctgatacccaggagctgtcatccttaatgcttgacctgttacgtttgactctcggattcgttggctacgatttcgaaacccccaatcactccatcatcacgaacccgctcgcctaccgtgttctactcgtggacatggacgtctggcgactcggagaatctcaggtgatggggttgtattactctcaattctgcacgtttgccgccgatagtaattatcgcagattcaacgccaggcgccttagtcgtatgcgtaagtttgcttcctcatgacaccacagttcttacctcaagctgaccaaactaggtgtcaacaaaaagttactggaaactttgaaggaaggggagctgaccgaagagtctctccaatcttgcttatcggcattccgctcgttgatggagagcagtccctctcccgaccttcttcgatcactagctctgtccatcacatatgcactccataagccaaagaccccaacaaaccttcagagaaagaagagccttcggtacgcggctacatcgtctcgacctgcgtcggcaacaccagagaacaattatcttcccagcgtgactgtgggcattgcaatgctacgggtgtactctgccgtgctgtgtaacccacatgaccctacggcattgaggaaatttgccaaggccgtcacaaacaaggtatgtggatgatcagttgccttggagagagttttgtttaatcatctgtgcagtggcttctttacctcatgtgcgaggaagagcctgaggttgtgatacttgcaacaaagattctggcccgcttggtcgtggccattggcagtgcatacagcaagaaattcgcggagaagagtggtggatacatcattctagaacaccgtctgaagagatgctgggatgttcccgcgttgtggcccatttgcttttctatctttttcggggttgatcatgctttgctggatctcgacaaatccctcaacgtatccgagctgcttagagctttcttggccgaaggcgatgtaacggtcgtctttccggatatgctacccgttattatgaatatgttgaagagcggggtgcgcaatttgactatggcaagtgatgcgcaagaagatactcaacgctctctggaagagcgtgcctctaaatgcgatgaactaaaaatgaacactctcaagcttccaggtaggctctcgttgctcatgactaaggtctggggttactccaactaacgccgttctctactgttagatgctactccctcagaccggaatatccatgggtttgctctcatcaattcggtggttcaatttttagaagaagcacgcgctagatcaccaagcttccaggatttcactgcacaatcgacttacgtgcaggagctactttctgtggtctatcccgttgttgtcggtgctgataccgtcagccccagcgaagaactaaatttccgacagaccggactcagcttcgatgacagcaatctagtactacgaccgcgctctagtactcataatgcattgaccgctttacagacaaccatggttgactccttgggcagtccagatgaaagcactggttctttgaaacgtggatcatcctttattttggtctcgcctgataaaaccaagtaccagccctcttctgcacggatacggcggctgatgaacccaacctttgttggaactaaagctgccactgataatcccattgtcaaggcagtcttgaggcttgttctggccgtcttcgaggatcagcttttaggacgcaaagacttttcgggttttggtctctatctgaagaccccgcccggcttcctggaacaccaggcgtacttcaattcttgggttttttcctgtgtgctttcggcattgcaagaccttcctctggtccgacccggtctgcttcatgaaacccggacacttacgaacctcgggcgcttcgcgacacatttgacggaggcagtatacgaaggctggttcatcaacggcgcatcatccacacttgaatttattggtccaattttggagtatctccagcgcccggacgtatctcagttgaaaagcattcgtttatgtagccaggctaccgcaacgattcgctcgactctgtacagagttatcttatttcagttgtcagaggcagatgacactgaaaccgtgacattgctaagccgattgaactactggcaggtggtccttctttcggcggctgaaacccaatcaaaacatctacacctgctatgctacctgctgtacaccaaactaatcagcacaaatggtgatgttcgctcagccgccactcgcttatggagaatcatattggtgcaggcaccggatggaataacaacactcctcagctatggctctatctccctccagcgtcggttggctgacggcttcgacgctctttctggaatggacgacgaagctttcttgctatggatcgatgaccagcgcgacgatctggatgccttgttcttcggtgtattttctcgatcgtgggacaccttcattcaagaagagaatacaagcactgaggagtctgttaggtcccgggtatcgaagcgtaaagacaaactcagacaatgggctcagatcgaaaaattcgatgaagacatgacgcgaaagcacgaagctactttgccacattggatctcgaatatcacggcatccgagttcttaaagtctcaacgattcttgcaagatcttcaggatagctctaatttcatgtggtcagctttcgccgatttactgcttgacttgcgacgaccgggcggccttctcgcggtagacaaggaaaggagatggtggctagaccagaccgaaggtcgcagccgtatgcgactacgcctggttccaaatgagtctggtgaacgacaggactatcagcctaagcgtaaagcctccgagcctccagcaatcaaaatcgacacccgaatacgtgcactctcggagggtgagactctgacggcacctcatcctctcacaggggaacaggagaatccggaaggcgagtcgccgaacgacgataccgacaaccggagcctcatggaggataatttcgagatgattgacgatcctaaaatcgagctcgaagactatgaagatagaaaccggaaggtgatgcgatctcttcaacgtggtgatcaggttcaaagcgtgtgcaacctgtctcgaatcattggtctagaagcagtggaaggtatctcaattctcggcaaggactgcatctatatcctcgacaatttcttccagagagcagatggcgagattgtgaacgtctggcaagcccccaatgaggaacgagatccttatgtgcgcatgatttctggtcgcgaatcaaatgaccaccgctcgcaggagcatcacacaaggagctggaaatggtctgatttggtcagcgtttccaagcgtcgcttcctcttccgcgatgttgctcttgagatattcttcaccgatggcactagctacttgttgacattgctttcggcacgagctcgagacgatctgtgcaaccaactggctatcaaggcgccacaggtcacgggaagcaccggacactcgcgaccggaagacgtctggcgatttgaaactcttcgcagtcaagatgatgcaccacagaccctcgggtctaaatttgctagtgtcttcggtcaccttccggcaaacccagcaacacgaaaatgggtcaagggtgaaatttccaacttccattatctgatgttgatcaacacctttgctgggcgtacgttcaacgacttgactcaataccccgttttcccgtgggttttggcagattatacaagcgaagaacttgatcttaccaacccggccaccttccgagatttatccaagcctatgggttgccaaacactagaccgagaaatgggcttccgtgagcgatacaatgcgtttgctgaaatgggcgacgatgactctccgcctttccattatggaacacattactcttctgctatgattgtcagctcctacctcattcggctgcaaccatttgtcaagtcatatcttttactccagggcggctccttcgatcatgccgatcgcctgttctattcaattcgcaaggcatgggagtcagcatcgcgagggaacatgaccgacgttcgagaacttacccctgaattcttctatctcccggaattcctggtgaactccaatcattatgactttggtcttctccaaaacatgaccacggccattgactcggttgagctgccaccttgggcaaagggcgatcccaagatcttcatcgctaagcaccgggaggcacttgagagtccctatgtttccgagaacctccatcactggattgatcttgttttcggcagcaaacaaaagggtgaggcagctgtcgagtctgtcaacgtcttccaccacctctcatacaaaggtgctaaagacttggatgccattgatgacccaatggaacggttagccaccatcggcattattcacaacttcgggcaaactcctcaccaaatcttccaccgacctcacgcccagagggaagatcaacggcaccgtataccgcggctggacactcttgcagaatccctgacacagatgcctttgtctcttctcgatattgaagaacgagtaaccaccctatccatgaaacaagaccgtttgttgtgtaccgcgcccctgaggctcaacgtgccgccggcctatgactactacatggaatggggtttcttcgatggtagtgttcgtttctacgctgccgatactcgcaagctcctgggtcactttgagcaccttcatgttggtcaattgtctcatgctagctttgcggattcccgcaccttagtcacctgcggtacggactgtaccatctcattatggacggtcactacaacctccaaatctgttgatttgcagcccattgggtcgctatttggccatcgggcccccgtaactgttctcgccgtttcacgctccttcagtgctttgttgtctgcctccaatgatgggcaagttatgctatgggatctcaatcgacgatccttcgtccgagcccttcccggcgacggtgcggtcgatgtatgttttcttcttcctaccacctgctgtcctttactgacaaattagtgtgctcgaatcaacgatgtctctggagacattatggtttgtcgcggtaatcgcttgacattatatacccttaacggcatattgttggttgaccaaccagtctgcgagtcaggcgacgaccacgtcttgtcctgcgtcttctacgagggggtgcagaatgaatggctggaacgtgaattggtattaacaggccatacccatggtgtagtcaacatttggagcaagaccattcgcggtggccactttgagttggagctgatccgacagctgcatcataccgacagctgccgcgataatggtgccaatatcaacgccggcatcagttgtattttggctctcccccacgtggtctatacgggggatgaagccggccgagtggtgagttatatttttccggttcatgttcattaacgaagctaacatgatggtagtatgaatggaactgcattcagcgccgctgattttcttggttatcgtcttcccaggggattgggtctgttgtactttgcacaattttacacaatacacaattatttctcccattcattaacttcaaaccttcataattcgacatccgtactatcaatctaccaatttcctcggctagtatcttcagccattaaactagggaagggtgtcattcggacggaataataaatacaagggagagaaagaaaggagaaactatctataaagatctcgacaagccatgcaaatcatgaatgagaatgtctacggacacactcttttactaattttatctaagggtagaaagttactactttggagtcttttctatagaaaaactaactctagcccatgtaatatagtagatatattaaataccctctatactagtagaccggccggagtatcttagtcgaatcgacactagttgttttcctctttgcagatacaacgtagttcgatcgccattagaattataaaaaaaaaccccgacacttgctcagctgacggccgcccaacaacctagccacaattccattccagtctatggaccattcgagtgagccgttttcgactacatacagtactagtgggtttgtactttctactttccgataggtaacatgctgcgcagccctcctgggaggattacagtgcatatggagagctgtaccgagcctagatcgtcgttatgcagcttcagtccgcgtacgcccagtccctaccggtgacccgttaaactaatgagtagctgtttatcagttcagttagctacggcatctccagtggccctagcacccgccagcctttggagagggatttattaactgcatactacaaaaataacctttatcgtcagcacaccactttaatatcttcagcccaggaatcctcagccactaccagagtttaagcgccgtgctgtaggattcccttctgggaacgccacggcaaaggctcgtactatcggacccggccattccgttttgggtttatatgataatgctgacatcaagttccatcgctcttctggagctgaatctgatagtagcatttttggagagggcatatcctgtcgcttcgtactatcgggtatatactaaccatttacgccaccctcgcagcctcggggttctcctatccccgtatatgcgtcgacgccattatttcatttcagctccgagtgatctatttcctgcaggtgagattggcatatggctcggtcatatccgaacccacttctctttggttcatcgtgagattaatgtaggtgtaagcactagagcacagcgcccaaaccgctgaagcactaatgtcgattggattctcggtggcgatctgagtagcaaatagaattatacctcaataatagccgagagaaggtatctctattagccttcgtatcacggtcccgtttgttgtataaagcgtccatatcccacgagtattggagcttgtctcctccgcttgactcgacaagacactatttctctattagagcatttactctgcagcaagcagcactcatacacaatcccaggtccagatatactagtcacaccagcatcctgtatgtatgctaccacaagctcttcaggagcatgctgacccttgtagcgctacaatgtcctacactatccgtctccgtgtcgagaatagcacctcggacgctctcacagttgtcgaaaaaacctgctggtactatgccaatggatgtacctggaccgagaacgacggccagcatgtgctgttcatgggaggtagcggtacctctggaatgcttcgcttcaaatcctccttcggtgaaatatttactatcgtcgtgggcatccacaattacaaaccatggtgtggtttgctgtgggacctgggggaccaggatacggcactgaagctgcatccggaattctacagagggggcaagtattcgcacgcgacgcctgacgcgtgttacagccccgtgacgcatgttacaagggcttcgattacttttgagagggagaatcaaaacgaggtatttgctgttttgaaatactatccatcctaggtagtccaggacaggcgtgtttgctagtttgccgtgggatagggcggcagatatgtcaggtactgattggtcgactctgggtctagataggaagccttacttccgcactctattctcatctgtgtcactcatctgtgtcaagaatgtatcaagagtgaataagataaagaagatactttaaacggtccgttaagtctgaaaggactactagcacaatacactagactcctgacatttctagacctatcatcacccctgatgcggccgaaacggacactacagagataaatattatttgtgacttattatgaactgaagaagtgctattttggataccatgaagcagtccgactcgtctcgcttttttgctcatccagagtatcatcaatgctcacctgagtattgctcacatgagactcagaatagcactctccaagaacaacttcatacatgcgaatcagaggaatgtgagatcttacgactccccatggaagacttcgacaggatggtaattgagagcgcatccacacccactccacctgaaggtgcattcgtgtggccaaccgatatgacgaagccaatcactcccttctttgcacctaaatctacatacgttgctatatcccacgtgtggtcagatggcacgggtgtgggcttgcgagagcctggaagggtcaaggaatgcctctatcggggatttgcgatcgtcgcggcagggtatggctacaaaggattctggtgggatacaatctgcgtcccaagagatcgtagggcaaaagatgtcatgctcaagaatatgcatctgaactacaaatacgcagcatttacccttgttcatgagtatctgtgtcagttcccacggaggcaagatggcacccctgctatcggtcttgttctatcgccatggttcacacatggctggactgctttggagctagccatgtccaacaaggtttgagtgccttatcgactatctccagagaggcctctagaagaggtcattgtcgatcttgaggataacattatcacggaagacatcgcaactctcggccatcgagtagcaatcagacttattcggcgtctcaaattgcccggtcgttctctcttggatgttttgaaaatcatgagctgcaggacaacctcatgagcacaagaccgaattatgattatagctctcatggcacaagccatggaccttgaatacagtgactctatgatcgagatgaccaaaaatacattgcgttcatgcaatgaaatacccaagacattcattttccatggtcatactacactccactcgcgcggttccttcttatggtgcccatataacctgttcgacagaaacttggctgtgactttagcttgggataagagacataaggagatgttcatttggagaatacgaaacgttgaaatgatgacggaaggatggagcaagtctgataaaggttgattttggaaccggcatatcgaaaatgataactttattgtcttgaatgatggtacggcttttgggtattgggggtttcaattgatctcaattgagttacccttgaagctgaagccgtacagttcccatgtatctagggaattccaaattcgggctgcttagagccatccatcgaggctcatgcttcttcgtcaaactttttcagacctcgcaatacttgtgcaaccaatcaacacgagcatactgtcagaaagaggactcgaccacctattcgtcggtgaaatgtaaattggttgtcactaccttggctgcgtagctgtggatttcaatgagttcgaaagcactgataccgattattttaggatcggcttggatggaaaagagtgttcatccaggaggtggtggacgagtacaggaagtttagtagacttattgaagggcactttggtgagaagaagacacaagaagtccagacccttagggctagtgtaagaatcggaaccgaggatttagcacttgatacgcgccgagtacctctgagatgatattacctaggtcgttctgggtaatggacattacctataccagaagttgcccttttggggaattacatggcacttgactgtgactcccgcggcgtgagattctgtaaggatcgcatggtttctgattggactacagtgtagtggtgcgatgaaagagggagagagttgtcaattcctaaaggggcagaatgcccaactatctagttataggggttagtgcctgctgcactgggctgatggccaggtaaccactacatccaacaacatgatatgtgtttagactttagactccagtgtatggggcgaaacgcacgactagtactgaggggtcggtgtctgaggcattcgtccggtgatcacctgacccccatgtataacaatatgccattcaactcccgagccctccgaaagatctcacgatagattcccaggtagcacggtcttggtcaagctcatcgggcaacatgtctccgacatctccggcattgcgggggatatccggggggcgggcaccatcgaagattgctgctgtggcagagcttattccgcaacgcttataccttgattgccgaccttgccatagactcgtcgattcgaatctcctccctgttgatgagtagatcaatgcttgagcagacaacatgagggcttggcagaagaaaggcctgcaccagtaggtagtatggctttgagcactgtcatctccgcggctttctctattgctcctttctcttccctctcttcgctgctgcttctccatacttcttttcgattctcagggtggatacttcactggtgtagaacctttcgagtaaacgggtatcatgcccggaacttacttctggtagaaggatgccttgtcataccagtgaatcgggtagctcccaggagaggataaattctcgatctggtattcttcggcatacgcatggcgtaatttttgtagaaatggatacgatatagggagatcgcacaaacgtgttcgaagctcgatttctgtcacagagtttgaagtacgtgatacccacatccgaatatcatggtgtaaggctgcctctgcaaattttctcatattactcggtcgaatgttttccttttccatgcgatcaaccagaggattattgtaaagatctgcaaagacactcggacatttctttgccgcctgttgtatcatagctgtcgtcggcgcgtcttcggcagcaaatgctccttcgaggtaaatccccagagtccttcgggaagattcttcaaggagaagagttcgttcgatctcacgaccgttgcatcgtgtaactctatcctgaaatatgctagataaagacacaatcactccgttagtaggtattccatgacaggatttgaacatttacctatgctctaacattgaggtcttggaggtcatggggacgctctggaccgaagctttggtagggccacccggtagtggtgaagctgtgacgatctcgagcacaagcgagaacagtcatttgcataaaatcagggaacggaacttgcagctagtttttcttcctttcctctcccgtacttagtattctgacgaaaaatgcacttattcatctgagaatttggcatgtagcagaagccactaccgggggcgaccgcagcagcagcgtgatgctcagtggcatcagcagcctgattgatgcacacgttagaaataatattcagtcctgcctagtcgtgtagtcccgagagaagactgctccttgtagagtggaaacagcaggcaatttcttaccttcatggcattttgggccgcggcccggaggttcccaacctcttcatgggagagaggagaccccttcgccttggattcggtggcttattcagtatgttagtaatgctcagtcaactatagggcttattgatcgttctcttaccctgtgggccagccgcttcttctccttgactgagatagcaagagaaacaagaaacaagggcaaagtgggagagggcttgcttatatagctggccgattccatatgtcagtaatgctcagtcaactatagggcttattgatcgttctcttacccggtgagccagctacttcttctccttgactgagatagtaagagatagtaagagagagagaaagaagaagcaagtggaaagtaagagacggcctgcttatatagctggccgctctaatgacaaacaagacgaacagcaaacatcgcgatccgtacaatgggatcaatgactagatcatgatatagaccataaattttgaacagacatagtgagtagaagctctgttcttgcctaaccactctctctcgaaggacagtttgtagcttcttctctagggacaactgccaatagtcgatcggctaatacacggtcttcttctgtgtcctttatactacagacttgttgttgagggtgactcgctatcctatgagtattgggtgagcacaagttgcacttggctgggacgcataaccctactttgatcataaacacacaagtaaaactagtggccactggcggtcgagtatggactacagcaccgcaccaggactggaaggctattcgattgatccaatgacacggaagacatggaagacatggaagactgtagaaaaccctcttgaacaagacatactatactccgtaggcctagggaaaatgatacatacatgttactactccgtataggtacttccaattgaaagtttcaagcaacttccattcggaaatccgtagggtccatagttaagctgttcggaaatcatatttctccataactaccccgtagccgtcgacatgtatttaaccgggcccccggtgaacgttgcaaagaccgctacagtagtgggccgttgtccggtctaccatcctccggttgggggaagacggagcactctgcgccggatttgggattgtagtacacctattcaagccgttcaagcagaggaaatattgaaaacaaatcgaagagtattaatagaaatacggcagctattttagaacgaagaatcaagaatccaaggggaaatggcaaataaaacaagaaaagaagtcggatgttgtcgaggggagctgtctgatttcatcgtgcagcgtcatttgccccgcctgaaaatggggcagaggcaaggtacttgtgttgactatggcgtccccatactaagcgcaagtacccggcaattgatctgggactggtcaatgacaccacccctccttcttaaacaccgcgccgtccgccactcttcttctctcttcatactttcttcatttcactttcaaaacatcaaaaaatgtcttcttctcttgaacagctcaaggctactggcaccgttgtcgtttgcgactctggtaagctctcaatctgattatttgggttgtattgaaaacacgctaacactaaatatttaggtgacttcgccagtatgtattccagactttgcttgatgatatgggttccagcattggacagctagctaacttcaaccacagctattggcaagtacaagccccaggatgccaccaccaacccctctttgattctggctgcttccaagaagcccgagtatgccactctcatcgacactgccgttgcctatggcaagaagaacggaaagaccctcgatgagcaggttgaggccaccctcgaccgtctcctcgtgcaattcggaaaggagattcttcagatcattcccggcaaggtctccaccgaggtcgacgccaagctgtccttcgatacccaggcttccgtcaacaaggctcttgagatcatcaaggtacgtgcacgagtttatgcgaaatgacttccggcaattccgagctgacccttgctactcagctgtacgccgacaacggtatctccaaggaccgcgtcctgatcaagattgcctccacctacgagggcatcaaggccgctcacatcctccagtcccagcacggcatcaactgcaacctgaccctcatgttctctctggttcaggccattgccggtgccgaggccggtgcctacctcatctctcccttcgttggtcgcattcttgactggttcaaggctgcccacaagcgcgactacaccccccaggaggaccccggtgtcaagtccgtccaggacatctacaactactacaagaagttcggctacaagaccattgtcatgggtgcctctttccgtaacaccggcgagatcaccgagctggctggttgtgactacctgaccatctcccccaacctcctggagagcctgtacaactccaccgaagccgtgccccagaagctcaacgccgccgatgcctccaaccttgatatcaagaagcgcgagtacctcaacaacgaggctcagttccgcttcgacttcaacgaggaggccatggctgttgagaagctccgtgagggtatctccaagttcgctgctgatgcggttaccctcaaggagctccttgcccagaagattcaggcttagatcttcttttaattgtttaatttcttgtaaattggcgatctcccaaaaaattggaatcggtagatacgaattgatgaatttggcctcagtgctattttgatatataattctccggtgtcggtgtagcagatcagacttgaggggtaaagggaaccgcggaatctggccgggccggcttattcaggcccccgcactagtttagccttctactgctttccagctatggtgtcatttcacccggagcagagttatcctggcatcttatattacccgaggttgtgacaatgctattaggatgggttggagctgtagctgtgagacaagtgtacaatggtattgcagactgcataacacttctagcatgcagctattggggtatgtggcagcaattatttacacagcagtatgcacattattaataattatgtcataattattccccctcgttccgacttgctacccacttgggaaggtgggggatgttttgctgtggtattaagtaccgagtacacgtatacagagctctgtttatactgcgatacatgtacccagtacttgatccatacaagtgtagagtcacgtcgacatcattcgccttattatctccctccgcccacttcctctcctcttcttcacaatcctcattctcaatcttcaatcttcaatttaaaacattttaagataatcaaaatggtcaaggctggtaagtaatgtccattattggttctctctgggccatacataagctctcctcagtctccaagttccccacgatcggtggcaaggaccttgggtgtgagcagatttgagcaccttgtgatccagagcgcaaatccgggcctatcggcttgcgtcctcgctctagctctccactgctgtctgggtatctgccaatacctctgggacaatccggggatcatcgctgctcatttgctagaagcatggcatcctgatcctgggtgcggcacgagccgttgctgaggctgggaccagacaggggctctggagatctagtagccggcatgccggacagccttcgataagcattctggaacaattcattgacctctttcctttccgtgcagttgctgttctccgtggtgacgctaaggtcgccggcaccgtcaccttcgagcaggctagcgagagtgcccctaccaccatctcctggaacatcaccggccacgatgccaacgctgagcgtgctttccacgttcaccagttcggtgacaacaccaacggctgcacctccgctggcccccactgtatgtcattgatcagccaggtatgaggaggaaggatgggatgctgatcgcttctagtcaaccccttcggcaagaaccacggtgctcccactgacaccgaccgtcacgtcggtgaccttggcaacttcaagactgacgctgagggtaatgccaacggctccaagcaggacagcctcgtcaagctgattggtgccgagtccgttctgggcgtaagtttataattaatctagtattgtcgaggcagattgctaacattgtttagcgcactctcgtcgtccacgccggtaccgatgacctcggcaagggtggtaacgaggagtccaagaagactggtaacgccggtccccgccctgcttgcggtaagttcatgaaggcgtgctgaggtggagatgaatgctaataatctcttctaggtgtcattggtattgccgcataaatgcagctctattcccttttgaaccctggattttgatatccccgtaattggtggatggaaaatgcaggatactccgtctaggatacatgaatgaatgccaatttgacatgtgaatatttggatttggatatctgtcatgatcgatgaccactgtatagcttcgatgctttgtagacttccgtagaagctcggacggctgaccgctttccccacaagtctaaacaccggccacgtttcccctcaggccattctgtttgctctcaacttccttttctcttgtgttttcttttatacttttattctggttctgtcttcaatctcatcacaattgtgcatgtggtagtggagactgtttcattcagtatgcctttcgaagcccgggtcaagtctgtcctgtccggtgacacggtcgtgctgtcgcatatcaccaacccttcacaagaacgtgtcctgagtttggcttatgtctctgctccaagattaaggagagagggtgatgaggtaggtgcattgttgagattgattgcctgttgattgcaccattggaagaccaaattgctgcttgtgtgatctccaaattggctttctggtcacaagagctccatttagcattgaacaaatggccctacctaaaaagcgaagagatcgaaagagataaggctaatccaaagaatcaattatagccatacgccttccaatcacgcgaattcctccgcgagctccttgtcggcaaggtcatccagttccacgttgtgtacaccatcccctctggtgccaagcgcgactacggtaccatcaagctgcccggtttcgatgcctcattgcccgatatcagtgtgcaggagggctggacccgagtccgcgaagaagcaggcaagcgtggagatgaatctgaggagaccattggactcctggaccgtctgcgggcattgcaatccctcgcccaggaggaaggaaagggaacttgggctggcggtgacgacgggcacatcgacactagctacgaattgattggtgctcgggatttggttaaacgtaacttgggtcaccagctggaaggtatcattgagaaggtcctgaacggtgaccgtgttgtgctgcgtttgctgctcaagccgcaggagcacattcagactgtcattgccgttgctggtatccgggcaccatccgctaagcgcacaactgctgatggcaaggagaccgcggctgagccgtttggtgatgaggcactgcagtttgttgaggaacgattgttgcagcgcaaggtcaaggtttctttgcttggtgttacgccgcagggacagattgttgccaccctccttcaccccaatggaaacatctctcgattccttcttgaggctggtctagcccgctgccaggatcaccactccacacttttaggttcggacatggctcttctccgccaggcggagcttacagcaaaggccgatcgcaagggattgtgggttagccacaccggacccaccactgctggtgccgcggctgtggactatgttgtcacccgtgttttgaatgctgataccctctttatccgcaacaaggctggacaggagaagaagatcagtctcgctagtatccgtcagccaaaaccctccgaccctaagcagtctccctttgctgctgaggcgaaggagttcctgcgcaagcgagtgattgccaagcatgtcctggtcaccgtcaacggcaagaagcctgcaaacgaaggctacgaggagcgcgaggttgctactgttgttcacggtaacaccaacgttggtttggctcttgtagaggcaggttacgcctctgtcattcgccaccgcatggacgacgctgaccggtctcccgactacgatgcgctgctcgctgctgaggctgatgcccagaaggagggccgtggaatgtggacttccaagcctcccaaggcgaaacaggtggtggactattcagagagcgtgcaaaaggccaagctggagcttggtatcttgcagcgccaaaagcgtgtccctgctgtcgtcgactttgtgaagtctggatctcgcttcactgttctggttccccgtgataacgccaaattgactctcgtcctgtccggcatccgtgcccctcgctcttcccgcgggcccagcgacgccggtgagcctttcggccaggaggctcacgaccttgccaaccgccgctgcatgcagcgcgacgttgagattgacgttgagaccattgacaaggttggcggattcatcggcagcctgtatatcaacaaggagaacttcaccaccgttctgttggaggagggtttcgccaccgtccatgcatactcggctgagcagtctggtcacgccgccgagtacttcgctgctgagcagcgggctaaggacgcccgcaaaggtttgtggcacgactgggaccccgccaaggaggccgctgaggctgaggaagccgaggctgccaatggcgcgggaactggcgctgaaagcgatgccgcccccgcacagcgtcgcaaggactaccgcgacgttatggttacctacatcgaccctacctccgccaagctcaagctgcaacagatcggcaccggtaccaacgcgctcaccgagctgatgagcgctttccgcaagttccacatcaacaaggccaacgacaccccgctgcccggccctcccaaggctggcgactgggttgccgcccaattcaccgaagacggcgcctggtaccgcgccaaggtgcgccgaaacgaccgcgagaaggagcaggccgaggtagtctacatcgactttggcaactccgagattctgccatgggcatcacttcgccctcttacccaaccccaattctcctcccagaccctccgcccccaggccattgatgcagtcctctctcttcttcagttccccacctccgaggattacctcgaggatgctgtcggcttcgtcggcgaccagaccttcgaccgtcagcttgtcgcgaatgttgaccacgttgaccaggacggcaccctgcacgtcactctcctcgacccctccgcttccaagaacctggataacagcatcaacgccgacatcattcaagagggtctggccatggtaccccgcaagctgaaggcgtgggagcgtgcctccgtcgataccctctccaacctgcgcgcgctcgaggacgaggccaaggccgagcgtcgcggtatctgggagtatggtgatctgaccgaggactgacttcttgtatctatttgaattttgagctgcacgagggtgacctgtacagatattggttgggatggccctatgattagcatctggctgtgccatatacactgagatatggtgcttatttttaatttaggccggaaatttattgcattttgtgtttttatatcgcctgtttcgtctgttactaccttggttgatccggccaattagctttgttgatcgatggatcggcgatgtacttcggcaggtgttgggcaaaaagatactcaacgatgttcaacgatgttcaacattctcaagaagacctaaatcccacctgtgaatctgatagagagcaaagatgtatcacaaatagagtcaacccccagaaaacaccgacgctcgggtcaaaacaccgtcacatttatttcaccgcctccttccctccgccacctccgacgtctgttttggaaagggcgatctctcctgcaaaaaagtaaacaaacttgagagatcagagctcaccatgttttggggcaacaaaactccgcaggactccggagaggacctggcccgcaccgattcagctacgaagaacgatcccgccgcatccgcctcacaagcttccggcaccgcctggctcgccgggcacttgcaccaccttacaccggagcaggaggaaaagctggaagagttcaagaaagtgtgcgctgagcggaaatattacacccctgccgtgaaacaagcagatggcgtcgaggcgaagccggccagccaggacgatgcgactttattgtatgtgaatgtggcgcgtccaccttaaaccccaatccagctagaaatgaacaaaatcaaaccgaacgattgagtgctgactttgattatttgcgcaggcgattcctccgagctcgcaagttcgacgttgagggcgcgtgggcccaattcaaggacaccgaagactggcgcaaagacaacgccatcgaggagctgtatgcgaatatcaagattgactcatatgaagccgctcggcggatggtgcgtgttataataccctgtgaaatgaataccccgacctcgtgctgacatctactgtctctgtagtatccccaatggactggccgtcgcgatcgccgcggaatccccgtctacgtcttccagatccgccacctggatcacaaggctgtcgccgcttacaactccaccatgaatagcggtacacccgagacgcacaaatcatccaaagttcctgcgcgcttgttgaatctcttcgcgttgtatgagaaccttctgcgcttcgtgatgccgctctcctcggcgctgccacgtccgaacccggagacgcctatcgtgacgtcgaccaatatcgtggatgtcggcggtgtcgggctgaagcagttctggaacttgaagggtcacatgcaggatgctagtgttttggccacggcgcattacccggagacattagatcggatctttgtatgttgcgcccccgtttaatacgtccagggagttgaagataagttcgtgaaactaactcgctgtcagatcatcggagcacccgcattctttccaaccgtctggggctggatcaagcgctggtttgacccaggaaccacctcgaagatcttcattctctccgcctcagaggtcacgcccactctcaactccttcatggagccaaccagcatccccaagcaattcggtggcgagctggactgggcgtggggcgatatgcccaacctggacgagcccaccagcgagctgctccgcggcatcgagcaaccgctcgccgagggccaaaagcggagagaaatcatcaagggacctgttctgttcaacggcgatcacctccaggtcctaggcactatggatggaacgcagacgaagcggagagaaatcgttcccatcccgaaactccaggcttcggttgagtcagaggctaactccgatagctctgcagagaaggcggcgcctaatggcgcagagactaaggtagacgatagcgagaaaaccatcgacaacgtggcggtcaaaatcgaccagttatccgtcgatgagaatcatgtttccgtatagagcacagagcacatagaaaggtagcgggaataccgtgttgggatttgtgttggacatacaattagcgatgtgacatagcacaagatagcgcagatctcaataccgaggcatatttttttcttctctctgttttgttcttggatatatgtcggtttatatattatcatgaagtgggaactgcatgtgcatatgcatctatggcatgatgtgggtggcatgttggggtatgttctggtttcatcttcccaaaatttatatactctctccccgtatggagtagcttgctctggtttgttctccatctggattgactcgtatttacactgttcatgagccttgattatgcttgacatctggtcgtctataaaatgtactcctttgagtaccgaacagatgtgcatcaccatatttatatattttgagtgcgtccagtatatactgtagctaagtctctatgaagatttactaagagagtataactcatccttgagcatcggataatgaatcatacagaaatccccgaaatatatgcaagtcgaccaattagaatgagggctttggttgagcacatgactcgagcccatgtagatgcagacgcagggcaacgtctccacatcccatctatccggctgagtacgtcgaacatctagaaacgggtcgtgattaaccaaggaaacataatttactcatgaatgtccttgtatcatgatcacccctcaacacgaggtaaccatgtcaggcccaagcggtagctcgctaacgcggtaaacggccatgttgttgggaaagagatccaagatgagatatgatcgacgccacgctctaacccagtcaaatgcccgaggctcattttgcggggagcgtgaaagagtgggcattcttcttcacatgcgccgagcgtcgccaatggccgaacgactgggggagggatcgacaataagcccaagcacataaacccactaagccccgtacctggggtagatcgaagcgtgcactccgacacccttatacagatcacgaatcagccatgaatcgtaacgcaaaagactccatgaagtccacctggcggcagcaagcccgctcagagtggacactcttccactggttctacgaagtcctcggcatccaccccgaacacctcgacaagaacgtgcccgtccatctaaaggaagatgccgtgccgtacatcccagactggtccatgcaccgctgggtgctcacgcacgccgccatccccctcctgatccaccacgcgtacgtcgagatcaccggccacaacctcagcgcctggggcgccttcttcctctacggcctcgccttcaaagccatcgccatccacgaaatccacgtcctacgacgagtaggccaccagcacggcttcctagacggcgacaagcacgcgcgcgacggcgtcccagacgtcggcgtcgccaaggtcgtcttctcactcatgttaacatcaaccctccgcccaatgttcaccgtcttcatcgcctaccacgccacacacccgccctccacgatcagcttcctctggctgcccctcgaagccgggctgtacggtatcgtcctcgacttctggttctactggtaccaccgactgatgcatgacgtgggcgcgttgtggaaataccaccgcacgcaccacctcaccaagcatccgaacccgctgctgacgctgtacgcggactcggagcaggagttctttgatatcctcggcatcccgcttatgacgtatttcagcatgcgggctgtgggcatgccgatggggttttatgagtggtgggtttgccatcagtatgtggtattcgcggagttggcggggcatagtgggctgcgggttcatgctacgccgccgtcgacgttgagttgggctttgcggtggtttggggcggagcttgttattgaggatcatgatttgcatcatcggaagggttggaggaagagtcataactatgggaagcagacgaggctttgggatcgggtctttgggacttgtactgatcgtgttgaatcggttgagaacaatgttgattatgtcaattcgtcgcctatgccgttgtattgagtgaggttggcttgttgatagttttgcttctggtgtggaaatcagtacttataaagcctgtgcagtgttgcagagggttgttgacatggttgctattgttttcttttgctcactagttacactgtttgatgcgacgttggatcctttggatatcatgtctatgaatgaaatgttccccatgaccaatgactttctgtataccacaccgcatattattctgagcaggcatattcttctgagcaggctagtttggctcgagtacgtggcgagcaaatatggtatttaagatgttactatatgcagagaattgaagcaatgtatttattacagtttaaagcacatatggcatctggtatatgagcctatcaggcctaagccctccacagggcattaacttgcttctttcgagtctagacaaaaataattagcaaatgtaccgggagcagttagacaaaagacttaccatcggagccaaaacggcgacacccgctccgagtgccaccacagtgagaacgagttgcagcttggagaagctcttgccaaggatatcaaatgcctggctgggcgtagctcgggtaccgaaaatatcgcttccgtaagcgaagatgagactggtactttccaacagggtagggcgagagagcacagcattgatgccggcgacatcgcgcgtgtgcgagaggtaccatttgccatcgaagtcgaggtagggggcgtagcggaataggccttcttcggcttcggccgcggtagggtcacggtcgacagggcggcgagggtcgaggacggggcgaggaatgccgactatggagttggaggaggggagagtgcaaagaagctggcgggtggtgattccctggcgcgtttgagtgacggccatgtgggagattgattcggggatcatgaaggcctgggagatgacgtagggcaacgggaggatggcggtgctagagtagtttgtggcagagtcaaggagaccacggtcgttgggcaagggggattcgtagagctccgagatgaccagctggtagcccttggcggaggactcgcttccatcaacgtcgccccagaacgagtaggcgaaccagttctcggacatcgcggaagcaatgggttgcgtagagtccacgcctgcttgggtggatgcgtggatgacattgcctgagactccgtctaacaggtagaaactggcagtgtgggtctgctcgttcactgcagtcaccagggcgaggttggggttgaggtacttgtaaaggaccgagcggtttccaaggaccctgccgatggacgccacagggtcatgcgcaggacgagcggtcgcttcgacgaccttctgtccggagggaggaacaaactcccacacaggagtcttgttatccttcgcagcccagccgaggactcggccatcaatgctagtggttaccaagaatccatcttcgttggcaaatgcagcgactggtgtaccatcttcacggataccgacggtggccagcgagcttccatcctgcatctcgaagacagcaatcgagtggagtttgctggtagatggttcgatgcgggaaacgatctcccctgtcgacacatccacagtcacagagcctccgtcgtcggagtagatagtcacgactcctggcgaagtcaacatagccttcacattccagtccgatgtctccactgcctggatgccccaggaaacggcgccgtggtttccagtatccaaggcgtatacacggccgctcttggtggcgacaataactgatttggcaagtccaaagctgtccaggttggacacttcgtcggtcaagatactgctcagaatgcgcttcggcagatccttcagccagtcgggtagatgttccaagtcccggacatgacgcttgacccggtgtaggtacgcgccgtacaaagtctcgtgaccctcgacctccaattcatgggctagatcttcttgggcgtcagtttccgcccatgtagctgcaacagtatcaatgagaccctcatgccgagtccactcgatctggccatttcggataagttgccagtctccatacttccggaaaagtgctgtcctaacagccacggactttcctttggcgacaacctcggataccgagtgaagggcaatatcagatgaaggcttttgtagatcccatcgtcccagaatcccatgagaggcggatgatacaacaacggcctccaagtcggtgactcgagtgaaataaacattagcgtcaatgacactgactgcaactgctgactggccggagagatagggtagccggtaagccttggtgaccttagcagacaccaagtccacatggtaaacctcagcccaggctccggcctcagtttcaaagtggaccaagaaatggggcagagcattaagcttgtggggagcgtggaccgtgatttgtcgaattccggagccggaggtattgtcaatggcgatagaagtgacctccttagtaccaataacattgaccttcagggacttttgcgatttgtcggcccagacgatgataggcgaggcggaattagcgcccacatagaggacggactccggggtagccacatcagcctcagagttcagaatttgatgacgagtctgtcgcccagtcaatggatccaaaacagtgactttgatcttgaaccccttcaacatagccgagtggagagaaatatagaagacctcggtggaagaagacgagacttggaacgggatgtcgccgctagaagaacaattgattagcttgggacaggttaaaaaaaaaaagcaaagacgagaccaaccttgcatccttgtattcccaaacagtctttccagtattaccatccagccgtttcacaatgccgttgccctcgctagcaaccacagcaatcgtatctctaaccccggaggtcgcggtggcatcctcaagctccaacagctcgagatcgccaaccacaccctcggagacccgatgttcccatcccagcttgccatcctgggcactccaagacgcgatgtagttatccaccgcagctacaacggcatcgttgccatcgagtccgcgcaaaagacccgccccatgtgcgggagagtctgccgaccgcgatatgttctggcgccataccagtgcgccgtcacgggggttcacggcacccacaagcaacttgtcggatatggtatatataagggaggcatttgaagacgtgaatggcttgaggaagaaggtcgagtcgggagatggagtaccgagaagagcgtggtggaagtcgatgtggtcgacctcgtcagagtagatggccgccgcgggagataggcacgcagcgaaaaagagcgccgcctggagccacattttgacgagtgactcttattgaagcattgaagaggggaggtgggaggtgatgtagaatggatgttgtcaatacaagcttggcgtccgggcggtgataacccagatcttctgtctacaaccatgaacgtccaacctcgctccctcattgcctaatgtcatggcaatagaataaccacgacatctaaaaatacaataaaaaagacactacaaggccgcataagcgaccaactattcttcatcatcaagatggccccatgccgcagtgcgaataccgtaagtcaagtatctgatagaaacaatgccccagagatctttcgttgtagttgagtatgttttttcgaacaattcaaagcttcgtagacgtaagaatgaaaagaagatatctagattccatacaacaagctaaagacgtagccaaaaacatctagatcttggtctatcagactcgagtccctcacatctagctccactacaccagtcaattcatactaaagccagagccctccagctaggaatacggtttggcagttcctatttccagactatgagtttgtaatgctaacattactattagaatgacatgcacaagaagctgagcagactagacttacatcgaaatccaccgaaagggctagtatctcatcgtccgttgaaatttgcatgtactcgaactcgcactcgagctcctcagagttattagtgggcctgccaaaccaattgttcatcggattgaaaagtggacgtattgcgcgaaaagctccgattccaattatcacctcaaatcccctaagcggccttccttcaaaaccaatcatcgtttgatttcctggagcgcgatagccaagaatattgttcggcatatcactaggataaataagctctaagccgcaatcttatttcaagtggaatccattcgaagtagtgtgtaataatagaatcacgcagaatgtatgatccattcgtggctggcaaggcccgagcagctgcacggaaacccgcgccgcgagcgcattgctgaaagctcggcggcttgagttcaaacactacgatatgccaatattagcaggattccattccttgctataggaatacaatcaaatgagatggaatcacccaggtggtctatatcatcgtcgaggcatcgcggggtttttcgcttagggtttcaagcaacttctccagatttaattcaccacctttgaactggttcgaaagaagcgcccaacaatatctatgaatctaaaatccatttggtagatttgatggggggattttttctaataatttgctaacctcttcccagcatgtatcaatgctagagatctgttagctgacccccggctgcagtcaaatgaactaagcactaattagcaagtacttccaatagcagattcacaggatcaagacgcacgaaaaacgtcacggtcagacaaggatgttccgcatgatacacaagagcgagagaatatcgcatccagagccaggtccatttctgacttcttgatgatttttgagttgtttttcgtaatttggaagtagcaacggttgtttgtcgcttagcctagtgtcgctatcatgattgcatcatcatactcctattgcgaaaggtttccacagctagattagaaattaatcgtagtatgagagtagaagggctatccttgacgtctggagaccggctactacagcatcggatcccagatatatctgcactaagagtaggcttctacatcaatcaattattaagaatctaagaaagtccacagtttgttgaacttgctctcttccataaaagtaataaataaatatattgtatattgtgccttagtatgtactagtttctgaacgacacatcccagcaaaatcgctcatttatactggttgccttgtctgacagcgaaaaacgactttaattacggtcgttgttgaggaatcctagattgacacgcaggttagcatataaaaaggcttcaggcaaaaacaagggtcacgaaccttcagccttgttcagcagctggttaccaaagctgccactggaagagtcattgttgccagagttgccgtagctagagttgttgttgctgccgtagctgtcctggtcgcgaccagagctagacttgttgccatagctggaggagtcgttgtcaccatagctggaagagtcattgttgctaccgtagctgtccttcttggaggactggttgccgccgtagctagaggaatcattgttgctgccgtagctgtcctggttgccaccggagctggacttgttaccgccgtagctggaagagtcgttgttgctaccgtagctgtcctggttgccgccgtagctggaggaatcattgttgctgccgtaggtatccttcttggacccagagctggacttgttgccgtagctagaggagtcgttgtcaccatagctggaagagtcattgttgctgccgtagctatccttcttggaggactggttgccgccgtagctggaagagtcattgttgctaccgtagctatcctggttgcgaccagagctagacttgttgccgtagctggaggagtcattgttgctgctgccgtagctatccttcttggaggactggttgccgccgtagctggactggttgccaccgtagctggaggagtcattgttgctgctgccgtagctatcctggttgcgaccagagctggactggttgccaccgtagctggaggagtcattgttgttgctaccgtagctgtcctggtcacgaccagagccggactggttaccgccgtagctggaggagttgttgtcaccgtagccggagctctggttgccactgccgtagctgtcggagtcgttgcggtaagacattttggtgggttgtttaggggggattggtttgtgattggagtgaaaggaagaagatagagtgatgagttcaagggttatgatgcttatcccaccagcggcgagcgctttatttatctcccaccaggaagccggccagaatcgaatagaagagaatcgcccctcgtccgtaaacccctcaatgacaacatgtggacaagcgaggcgagcaggggccaatgaacatggcacggagaagctagtatatccaaagctcactagtttcgtgcttatatgttagtgattgctcgaaccttgggagccactttttcagcttaggagccacatttcagcttctgtggcctaatcgggacatgaccccctagttgacccataattgagctcgatgttgtgatatcatccaatctgcgaacagagaatcacgccatggagaaagccatgcgggactctcatttgccggtcgaatgatgtagctcttttccggagccggacttagccggagaggtcacttcccctcattacttggctcggtcattggatactgttatgcaggtaaagtctagactcctcgatctgatttgatgataggtgggatgtgtatgttcttaaacacgtacgggaagtacagagtagccctgggaaccctggaaaccctgaaggggccctcatttctttttttgggacaggcaatatgataatgtagtgagataagccaatcataattgaagatctggcatcttctgggcccacctaggcaagatctacctcgatccgcgctattgatttccatggtaacgtgatgcatttatctccgaggtccgcccggaatcttggtttggctttgccagtcccacggttcagataatgcacatccctcggtgtggctgtgcatgtgcaacctacccctcctcgacgccaccaaggtggtcagcctcgatttgactgcgacgtactcctccgtacaacatatcgaggacaagaattacccctatccacgggtggttttttgggtggtttttggggtagtttttgtgatgatttttgtaattggactgactacacgcaacacgtgtcaaaaaggtataggtatactgtacggagtagacaagtctgattttatctatcctatctgcgtagtctctgtctgggtattcattcactcattcctccccaagtatcattattactctcatccaattattggtttagttggagatcttgtcgctgacgtgcttgctgtatggtagaatcgaatgttagcagatatccagagcaagcaatttggagtgtcacatacccagtggccttctcgtaggccgagcgggcaccatcggttatcttctcctgcgtgttgcggtcgacgttgtagccagacttcttgacacctgcaccgaaggctgaggcaaagcattgtcagcgcaaattcgttttacaccaagaacgataaaccactcacccttgtcaacgtagtcgtcgctctgctggttgttgttgctgctgttgttgctgctagactcgtggttgccgccggagctggaaacagccttcttgatgaaatccatgatgatgatatgtgtagattatttggatatttaacagagatagatatgagtaaaaaagtagacaagaagaaagagagttgtatttgtatctggtcacagtagggctgcccctcttctgccaagtttacttgagtggcgattcgtcgtcattactccggtgtcttaccgcccccatgcctttccaggtatgcagtctgggtcagggtgggatggtaagacggctaattgcgcattgcggatcggtgggctaggctcgagcataaggaaccctaataggccatgatcttcaagtagtaaaagtaataattgagacttattttcaaatacaagttgttatatacatctttgaatgaaaggtaactccaaaaaaatgccatccaaatcaaacaaatcttaaacaccgaaacaggccttattggcagaccggatggcttccttctcaccctcgctcattgcgtcggtgatctcccaaggggtgttgcctaagcccatagcacgctgaccctctgggctcagcgccgaccaatccatagcacccttgaatcccgactcaccgggcccaccagcaccggggaaatcccacggaggcgaatagttcagcgcagcctggcgctgcttaagaaggtatttcacattcatgtcgcacagcggggtagcgggaatgtacataacactagagtcctgggtaccacggtgctccttgtccacggaatgaagagaatcgcagtgccacgcaacaaaatcaccaggcgcaacctccggtactgaaaccatagtcgactcgagatcgagatgcgggtgtgtaaccgggttgtactcctggcaagcgccaggcacggagccagggaatgtagcatccaaggccggttttgaggtttcgacgtcgaagaacggacgcaggatagtgtatgctgtgctgtggttgatcatggggcagacgtgcaacgagccctcgccaggcttggtgtccgacatagatagccaggcctggaagaaccgcaacatggagcatgcaccggcgccattgtataggtccatgttggcgctcagacggtgtcgcgcatcccatgcgtcgtattgttcccagttaccttcgaggatcttggtgtagactcgagagtactcggggtcttcccagcgctcgagggacccaccgtcaatgtgcggaccgagggtgaattttgagtcgcctggatcgcggatgcgtagacgatctgcgtaggtgagcggattggtggttgagatcttgctgttagggtcggatgaatgccacagctgctgcatgaagcgctgggtgttgagcatgttgctgtgaccgcgggcttcggcctgtgatggagtccagtacagctcgtagacagctggggagtcagccgggaaggccttgactcgttctttgttggcggccacatagtcgcgaatgcgctgcttatactctagggcttggtcccgggggactacattgcggacgaccgcactgcctcggtggcggatttcttttaatgcagcctcagacacatttccagagatcacatcagagtaatcaattgagggaatgatctggtatttgaaagtcagtcttttgctcggtgttgcgggttacatgtgcacgtacgtcgctgccctttgccttgatcttttgcacttcttcatccaagctagggagcaagcgctcccaactctttgtaattgcatctttgtttttctcgaagatttgcgctttcagatcttgaaaccgtgcggggagaggttctggcttgtagtcgggccttaagctggggaaaacggatgagatatcaccggcggccttggttgtctgggtcgaggtagaggccgctcggacagcggatcttgagataaactttgatagagacatggctggagtgaattcaagctgcgtattccaactttgcggggatctaccccagtgctttatatgtttttcgtggggaacacaacatacattggtcgaggcggaatcattccatatacagtaatcgagccgccgccggaaagagatgggccgcgaaattactacattaggagatcgacccgcatccggtccgtacctgcaggcgcttaccataggtacagcttctgttcatgacatcagcctacaaatcattatttatgaggctaaggatgtcaataatggagataagttctttcgaagcttttggcggttcggagagatcattcgggaatatgccaagccgggtttcgggatagaacatctgcattcggccgaagtactacggagtatacaatacaataggaatggaacactacctgccataccacggcattaactgtggacttcaattgaattgaacctgcgttatcttgcttgaaggataggatcaagtgaatgttatatgtgctgcagagcagttctacgtatgtctatatatctcgtagtgaccccgagggcaattctccgagggcaatcgacctggtccacggtttatataacccaagaaccaaatgaaggcatgccgagttctctctattgtaatgtctcactggctgatccaaactacagtatctagcacatattcgcatcaaacaatatacataagtgctttcatgaatagagcataatatcaagaagaggggaactgctgtcagatggcctgatacgtacccaaggagaccggagaattagattggattgggcctcatccagccggcctcgtacgatgtacataggtacaaggatcgcggccacgttggcctcaatccttcctctcgtccgaccggttagattctagtattctaccccgcgaggggcagaaaatgggcacggaatatgtatgccgcgcaaggtccacgatgtccactctatgtataaaagagggctgaatcccctgctagaaaccgtataactcaacccgtcaaccgttaatacttaaacatgtctatctctgtgcaaggaaagaccgccatcgtaactggagctggctccggtatgtctcctgcatactgcaatatcaaacggaagcttacacgtagtcaggtatcaacctctgctttgccagattgctagttgaaaatggctgcaatgtcctaattgcagacctagccttgcgtcccgaagcgcaagtgttcgtcgatgagcacaagaccgattccccgcgagtggtcttccaagagaccaatgtggttgactgggctcagctcgagcggatgttcgaggttgccgagaaggagttcggcgagattgatattgtttgcccgggcgcgggagtctacgagccggtaagaccaaaaaaacccccaaccaatctacaagtctaactagaacaatagctctggagcaacttctggcgcccacctggcgcgggcgacagcaaggactcgcccactggcgggcgatacgctataatcgatatcaacctcacccacccgatccgcacgacccagttggcaattgctcatttcttgaacaactgtaccagcggtcgcccgaagcatatccttcatatctccagtattgcagcccagaatgctaatctcgccaacccggtttactgcgccacgaaacacgccattagcggctttgtgcgttcgctcgccaatctcgacaagaagtttggtatccgagtcacggccgtggctcccggtgttatcaagactccgctctggactgaacacccggagaagatgaagttgattgatggcagcgatgagtgggtgacgcccgaggaagtggccgaggtgatgttggcgcttttgcagcaggatgaggtcagcgagactatcggcgaccggtcgggtaatgggcagcagtttaaggtggagggaggtacgattctggaggtatcaaagactgtgcgcgcagtcgctcaattcaatgaccctggtcctggcaatcgccctggaaacacggcgtcggatcatcacgaggtcgaggaggagacttataagatcctggagcagaaaggatggggactgtgaatgttatagtcagttagtatcaaatacaactccgacaattgtataaatacctcgaagtgcttgaaatggagttgatgttgtagcaaagtaccaagggcgggtcatgtgtcgacccgataagctttggaaagtcaaggttgggctctcaagtggccacggatctttctctccttaaattcctccgccttttccattctccagggcttttctcttcattgcaaaactactactaatctctctcttttggttttgcctcggccccgctggtagcggccgttaattatgttttgcacgccaatcgaccgataacaccatttccgcaacagataaccaatatcaaaatggaggaggccgcgctcggggttggtccatccgggggacatcagaatatgctgcgcaggtaggccggagcccaatatcttgatgttgatggtggctaatttggattccattagacgtgcagcccgtgcaagacctggagatgtcgtgggggaggccagttgggccagcagtgtgatcaacctggttaataccagtaagtgcgaggaagcgcaccatacaagagtgctccgaattctgatacaatttctcctgcagtcatcggtgccggtgtgctggcgatgcccctagccatctcccgtatgggaatcgtcctcggcgtctgcgtcattctgtggtctgcggtcaccgcaggattcggcctctacctgcaatcactatgcgcgcaatacctagaccgtggaagcgcctctttttttgctctatcgcaaataacataccccaatgcggctgtggtctttgactgtgcgattgcgatcaaatgtttcggagtcggcgtgagctatctcatcatcattggagatcttatgccgggagtgatacagggctttgtcggtagcgagcctggatacgattttctggtggaccgccacttctgggttacatttttcatgtgcgtagcctcgtgcattttgtctaaacgaggggaagtgctgatcatttgactttaggctgatcgtgattcctatttcctacctgcgccgtttggattctttgaaatatacgagtatcgcggccttggtgtccatggcctatttggttgtcttggttgtgtataagtttgttcaaggagacacgatgaaagatcggggcccgattcgcgtgggccattgggagggcgcagttccgactctcagcagtctgccagttattgtctttgcatttacttgccatcaaaatgtactttcccaagtcgtgactcgtcggttctttctaacaagcattttagatgttctccatcctcaacgaaatcggcaataacagccatttccgcacaaccgccgttgttattgccagcgccggtagtgcagctgcaacctacatcctcgttgccatcaccgggtacttatcctttggcaacagcgtaggcgggaatatcgtcggcatgtacccaccgggcgtgtacgcaacgatcggccgcgccgcaatcgtcatgctagtagtcttctcttacccactacaatgccacccatgccgcgcctcagtcgatgccgtcctaaaatggcgtccccgagcacaagtcgctggcgcagagagctctccaaaccgacacccacttctaggcccgcgcggaaaccgcacgccagagccaatgagcgaccttcgcttctccattatcacaaccaccatcttgattctgagctacctagtcgccatgaccgtgtcctcccttgaatccgtgctggcatatgtcgggagcactggcagcacgagcatcagcttcattcttccgggcttgttttactacaagatctcatcgcccgactcgcctacccaccagggcttaatgaaagaggacgatgaggcggaggatgatctctcaggagatgacgacggcgacgacggcgagggttccctcgctcgcccattgacagagagtggccttttgcaccgtggcacccgccactggcgcaaggcgctgcttcgccgactcagcctggcattggctctctacggcctcgtcgttatggtggtgtgtctggttacgaacaccttcttcaaaatctcacattaataggccgcgtcctttatgtatgaagtctctttccccttcttgttggccggagcccgtctttttaacatctttcaacccgccgtgtatctcaggaacttctcccttgggctttctcgcctgttcatcagtctcatttctctttccatattcttctccgtttgcgcattgctctctatgttcgctgctgtgtctattctgttgttggtattgctctttgcacgtttaagttttatttgatttgggttgtccatgctaggcgtttggatgattgtgtgtatttggctcgatttcttaatctatactgttggctgcattattacgcgggtatgcaatggctaattgctttggtaaggaaaaaagagggaagataggattcaaggcaaacttacagcgaacagagttataagaattcaaaatatgaatgaagagaagtgtacaaagtgattaaaagacccgatgtaaagcataaaaccctcattcgaaactaattccgagaagcaccaaaacgcaagcttatttgtcaagtttgtttgctatcggaccagagcctgctacaagtatgcatgtatctctcaaccctcaagacatttcaatgcgcaattagttgttgttgttagcaccgttcagaatccgcagaatggacatgaacaagttaagcacgtcgagataaagcgagatcgaagcagcgatctcctcctcaacgtgatagtgccgcataaccaactgcgtatcgacgagaatatagcccgagaagacgagagcgccaagaacaccatagatgatctccatcgtgctgttgaatgggataaacatagccacgaacccgaacaggaccatgaaccacaacgcgccaaacaggtatggcatccagtcggtgaaatcgtacttagtctggcatgcaaagagcgtcaaggcgacgaagattcctagtgttagtgcgagcgcttgcaccactactttcgcatcgtagaaagatgtcgccacgctgattgagtacgcttcaaggatggtgaagcctgataggaaaagaaggttggtcgggtaggactttcgtttccagaatgttgcgagcatgaatcccagagcaccgaaaactgagattatcatcagccagaagttggactggatccaggtgcggtaggagtcgttaaagaaggagattgagctgaggatcgttgtaaggaggagttgggccgttctgagcgaggagtgttagtatattagagcccacgcacttgagtctgcgtttgtaaatcgtgttgcacttacagaatcgagtacactttgcgcacgaattgcattcggatgtcaatcgttccttcggcgacggtacctccgaactatgcgattttatcagtttctgtctttctagccgggctcaagacccctaaaaggcatggtaaatgcataccttgaaatcatccggcagattgtcatcctcaccacgaggcgttgactccgctggagccgctgtggcctcgtaggagggaggggctcgggagtaagacgggtcatccaaggagtcccgctgaggagcaggctcgtatctggtgtttgcagccatgatggtatagagatatgtttggtctcgcggcgctggtgttgaacgttgaaatggatcgccgaccaagaggaagatgagctgaagcctggaggtggagcccatatgatgtgacgagtcacgtgcgataagccacatgtggggcgcgcttgcttatgttatacatacactttgctcgggtggcgcccacatgggtaggtggaccggggacagcattctatatacttttcactgtattctatttttttgcgggttaatatctcgaagatataagcacaggaaagacttcgaatcatataaagttctaaaacgctttcaatatttgagcttttataatgcactcgtgtcagatgaagcagcagaacagactgctatcgacttccagacccaccgatctatgaagaatttgagttatccgcacaggaccacgcagctgaaccaccgttcgccttgtagctgtccatgatgctgacgacagacccatatgtaccagcgaccatcatgaaactgccgatgacgataacaaagacactccaggaaaccatgaacatccacctcggggatcggtcgaccttccccttaccccaattatcgtacagccacatgcagcccatgggttggaaacacatgaatgtgccgagcaaagcaccgataagcgagacgagactgtcaaagacgggaatggcacttgcgatgacgtaggaaataagaccgactgctgcggtgcagccgatccacgagccccagtgcaccatgctgtttgaggtgaggtgtttggagcctctgagggcgcggacgaagacgaatttcgcgggcaactgtcagtgatgtgttagattgactggatcgcatagataaagagacctagagaggaagtgcttacatgaacgaacagcatcacagtaaccagaagacctggaatggcaaagccatagctgaccttcttcatcgtatcgccggcggagccaagagcaggcgaggcaacataagagccgcagtagtagtagactacaacgccgatggtaacgtagacagccgtcacgctgctttggcagatgatcaacgagcgagtatagtatttggggtcgcgcatttccgatacaatagagaagaatgccggtgtgccagcgtaggcgaagataatcgagctcacggcactgatggcttcactgaatttgggactggcaacgatcttgtagtcagatacccagatcccctcttgtggggctgaggccgggcggtcctgaacgccgacagcgatggtgacgatgaagactatagtacgaatcggttagggctatgttatatcccgtgacatctagggaaaccttacttgcggccaatatgcaagtcagtccaatccacgctaaccaactgatttttccgagagttcggatactggcgaagataattcctgcgacggctgcaacagcaacatagacagccgtgcatgtggcatgactcgagacggagttgagagcgattgacagaccgagcattcctgaaccggcgacgaaaatccagtctagagaggcaagttagaagcgaatctataatcgtgatcattgcatagacctacataggcagaacacaaagccgaaaacctcacgaccgatcacaccgaacatcaagtaacctgcatcgtcgataccgtagactgagcgatggttgagcttaaacacgccgaccatgtagtcggaccacgttgtaataacagcaacgacgatcaggcagataacgcctgggacgaggcctaatgtatcaaaggtgcttgggatggagaggacaccgaggccgatctggctcttcatcatgaggatcaccgttcctgcccatcctacctaaagaggcgttagtttgacccaattggacattccatggaaaagaaaaggaagaaaagaggaaaagaaggaacgtacatttcggtagttgggtccggattcggtgatctctccaaacacatcatcgtggttgttgatatgactattctggatttcacggctctgagatggatcaagaccttcaaggtctttttcgtttttgatatccatcatattgaagaatgggaaatgggaatgtaaggcggatacaaaaactgggtctcgaagtatgcgggatgtcgcgcttataactacaccggatgtctgaccgatgggccactacggccacccagagagacagataagggctaatcacttggattcaacgaaagtaaatggtgaggcgtctgtaatacccattgtgggtactcggtacggagtatattggctcactttacaacataattctacgctagcccggtttcagaactataaccccgtagatccaccagaagctgggcaatgataaattgttctcgagcattttgaacgccttttgaacgtatgactagtccgtggagactatgtggagtacaagtaggtacctaggtcaagatggttggacactttacaaggttctccataactaccccatggggagacgcggagaagttcatagttgtgcaaccttaactaaacaacgttacgcctaaagcgcccagagcgcccagagcgcctctccggatacctcggcaagatgcgtaaaataagagaacacctatgtatttatgctagtacatggacgatcttcatcaatgttatcaggcacgttatctatagaacaacaaagtttaacttacatttcccttatgtacatttatatagataactgctaacctgctattatcaaaccccccagataagctgaacatccaagctttgccacggcagtaccgacgtcagcctcttaccacatcgtgaggggtttaaaagggggggaaagctaaaaagaaggggcgtaggtggcttttcccttcgccaagcagctaatcaccggttgcttggccgctgatgaggcatttgcttccgagatcggcaaccgtacccggtcattgctaaagtgtacgtaggttctttgtatgttgtactccgtacggactacggagtagatatcatggctttcctattatgactcatatctctcttttctagcattgattagacgaacaatgcatatttggcccttttggtccggtactcgagagtgcgatagtgcgatcgtcggtgtccggaacagataggaaggtacacatgggccaactgcaattgtgctgcgaatatcaagggaatggatcaggcggtacatgcgccctgttagaatattttacgtacagagtactcagacaaagcctgggcgctctaactaggacgtcatttttcgcttaaattaacatatggagtagttgaaacctcgagcaacgggtagacaggatcctaacgtcagtttgttcagtatgatccactcctatcatttctgtcgcattctttaacccttgttagttctcgcgtgattttccctcggaaacctatgatctagaagagtccgtgaatgtaggatctatgatgtaggatctacaacatgcatggagttgccttccagaaagccctaacataggtgtcctacactaagacaaacaaagtaagatcgatcctatagataagacattatcaatgacaaaaaatatatcgttgaatcctggagcctggtcgatcaggtcgataggcaaactatgaggtccactggcttgatcttgctcctttgtctcgctcgttcgcagcaacgctcaatccgtgcttatttccgcctctcactcctcacatattcagatatcgaatcgatgtgctttcatacgacatagaatacccatcacgatcgtcgcttcactgccctaacatcccattgacatgccatattggtggcagtgctggcatgagtgtttcaggcaagggatatacagtaatgaacaagccggcagatatacaccgctaggttaatttcaaggttctgaagacaaggagctcgccacacaggatccagacacacccgaggctgaccaatgcgagacatttgggttcgcgcaggagctagcccgggaccgcctgctttagagacatcgccagattgggaccttcagagtccagaactctcgggcgaaagacccatgcagacaagcgcagtctccctcacgcaatatccgtgcccgccttccttcttctatctgatagaatccgagaggacaatgcgactgtattggctgcgctgacggaaggagaagaggaaggaaggagcaaaaaagccactcggcaggcctggcgaacaaacacggcaggagcacgtaccagacggataccattccgagcaaactactatctcgacgtgactcgggccaggtacccgtacccgtaggcgtatcttgtaatatgtgtgtttgtcgcgaagagaagagctgacccgaatcccaatattaatatttatgcatagcaagataagaagtatatgcaaagttactggagatatctataatttcacatcacatccatcaagcgggtgacggccccgacagagaatacccccctgctcatcagcaccgataggcaactggcgcagcctagctgaaacctattcaataatccgacccatcgtgtctctgcgctctgaatccggtctcgattccgaatcctcgtctgtgctcagatccgcctcgtcgtcttcgtccgtgctatcgtctccgccgtctgccatatccggtcctacacttgcgctggacatgtaatttggtagacgtcttcgctcgaaatcctgcgcgtgggctgaggctacaatcgagccgacccggctgatgccaaccgaggggcggcggttgcgggcccgcaagctggacccggacggggtgccgttttcgacatcgccgggcgccatgaaaggtgttgaggcgtgctgctgttcttcgagttggacatcttctgctgagccgtcgaggggtgctgcggctcgtgaggggacatcgtaggggagagggacatcacgggaggcgcggaagaggaggacattggtgcagtgttcgttttcgacacggaagatggaccaaatgccacggcgacagacctccgagaaggcgaccataaagctaagcagggcggactgctgtatatttttgatgaatattgcgtagaagatccagttgaaacggatcaccacatcgagcaccattgcggcatagtatacccatacgcgacggaaggcgaggacttcacggagcattgggttctttgcgtatgggttacccaaactccaatccatgattagatcccacactgaggtgtagacggcgtttaggagggcgaaggtgataaacgaggcttggaacctcgtttgaaggtcgatgcggtacatgctgagagtggcatagtagaggacaccgaataaatacttgcccaagttcaggagatgggggaacgcgttcttcgtgtccagatatcggcgaatacattggaaagctcgccagacagaggggaggcattggaaaaagcccaggagccgagagtgggaggagttgcacttgggagggtagtcccagtacgaggcatatagacagaagaagagctcgatgttccccatagcatatgtctgagaacagtacatgtcaccgaggaagaaatcacggaactcgactgggtagattccggcaagcaaaaggcgccactagataggttagatatgctaatcgacagtaatatgatgctgtatgaactcacattggaaaatgcgaaccatttgcgactcctgtggtaaagaacacgggccggcaagaaaataatgatcacagtcaagccaataaggacgacaggccaatagacatacatgtggttgtaccatgagaagttgagccacatgaataggcccatcaagaaaaggaagaaagaagggatctgtacttgtcaggatgaatgatcagagctattaccgcgaaataagacatacctctagcaactgacgccactctaaggtgtttctggtatcgtattcgaagacaaatgcatgattgatcttcgactttgtccaaatcatacaatccaagcagaagagcaagaaatggaagacgatcaggaaataccctccatatatctgctcgattggtcaatggagtcacacaaaagacgaaagagcgaagaaccaacctggaggagataactggtccgaacttgttcagcgacgttaggcgagcggagatttgacttagaatcaaccaaggccttgatggcaaacagagttccacccatcaacaatagaccggagcggaaagtattcggtgagtaatcaccagatttgttgattgtgtgacggagtttggagacggcgattttgcgattaccgccctcaaagtaacgggcatacaagtcttcgaccgctgtcatcaaactctcaatcacctcactctgtacgaaggacgctttgttgaccttttcagacatgtaccggagcggtggacgggcgtggaccgctttgtcgtatttcttgttaatcttccggaaagccgttcgattcaaataagcatatcccttgaggagctccactccgcggtagaactcctgcaacgcatgcttgagcttacgcttagcggagcgatagggcacttcttgactttgcggatcctgccgccgcatgaagtccctccggttggcgatgaactcccgatcttggggttgcatgccgggagtcgccatctccgccagtgcttccgagttcttgccgaaacggttctttcccaccaacgaacccttgattcgagcattcgtgattttcgcgaacccatttggtcgttgatgtgtctccgagtcatcggatttgattctcttagaagccaggacctcttggattcgctggtctcgcataatatgtaactgctggcgaaggacccgcagtttctcggtggcctcttgttctttcgtcacataaaacgaatcgattttgtgcaattcgctatccaagaactcgaagaattcgtcccgacgtttatcaagctctgatgtagcgctagggtctacctctgccgtaaacacgcgccgcagcagctgtgatgtccggttgcccgaggccaccttcgtcaaggcgtcaccactcgaatagctcgtccgtggatccaattggggcctcttggccggcaatggttctgataaagggcgagagggtgagccgttcagcatgccacgtcgatccatgaccggcgaaggtgtccggagattcccaagtctatctgcagtatcctcatgtggcggatagtcttcacccgggtcaagtgccgggtccggaagttcaaatgaggctacatccgagcctgcggtatggtgctgttgtggcggcgttgcgagtatgcttccataactaccaacgttctcagagaaccgcgatcctggcgtgcgaagcggttgtcgctcagttttgggcaccggcgtggagcgcgctgatggcggcttggcaccacttcgtcgtggcgtcgatgggccattgtattctcctgcatcgagatgcttatcggtattggagggtgtgagagcagattggactgcgccgcgactttgcgggctggaagtgggcggtcgataggacgggacgcggggactgcgatttgccttctgtagggcccgggtgatggccttgactttcttcttgccagtctagacagtacattcaggtaagtacagctgtgacacaatgtggcaatgatgacgaaccttgtagtcgagatactttgcccgccattcaggaacgagttcctgttccagctctctgcggatttggtcagccactggaatgtcgcacactgtcacgggggaatacaaacttggcaaatttcatcctgaccaacaatccaccgtcattgcatatggtttcgaaacctggagtgccggcgccgatccgaacatcaaatctcacacaagtgcgagggttccaaagctggagcaagagtaaacgaaagcctcgccactcctgagtcgagataggggaagacggatagtattggaaagaggacctcgaggaaaaacaagtatgttgtagaaattccaacgacgctatactcagatccgaagattctccccagaaaatctgcaacgccgcaaactctacggagtatcgcagctgaacctatacttttggcacgtgtatgagctcatccacgggcggcgcctgaattgttaggccgcaagcccacacttggtcagccttgtacgctgattggctgggacgtgatctcagacccacaaggccagattcctgaagtttggggagtccaagacctgggaatatcctcacttctttcatactccagggcttatgaagtattgacccgtgcaatgatctatcacttcttatgcagaacgaatacgaaaataccccgagaccgacgcaattcatcggcgattgacccaacgactgtctcctatctaagatacggcagcattggaatgcggccggaatgccgtcggcgtgttctcatggtgatgactggcttaagaaaagccccggcatccctgtgaaagcttggcgcattttctccgtcggaccagtgtcttattcgtaagtagacgtacgtagccctacgtatgtctatcggaactatgccatgcaagttcatatcgtgcatacatatgatctcggggtagggatattgatatcgattttggattacattggatgcttcgtttcaccgctctttgcggatacgaggttgaaatattcaaattgttcgatggatcatatctctttcttactacataccaccagaggggtgttcataaaacaagtttcatcattcatgtattgctatcctcgacacgactggcctagtagttgcggttgtcctcacggtagttgtcgcggccgttgtcgcggtagttgtcgcggttgtcacggttgtcgcgaccgttgtcgtgctgctcgtaacgctcctcgtacatgtgctcgacgttcttcttggcgtggtgctcggccttctcgcggtcaagccagttcatgcccttggtctcggcgagcttgtcgacctcgccgccgaccaagccggcgatgagctccttggccaatttgtggctggaaggcttgcctgttttcaaatacaagtcagaagattgtccattaatcattagttagggacgcaatgcgtgtcacgtaccctccttgcgctcgtggtcctcgtaggccttcatggcagcaaaggaagcggcaccggcaacgaactcgtgagagaacttgccctcatggtgctgttcgccgttgtacacctgctcatgtgcccgctcggattcatctagcctggcgttagcatgattttcgtttcaatagccaatggcgtgatgttgggatattgccggctatgcaggtcgggtcggccctagtgcatgcaagctgtaaggtatgtgtctaagggaattcgaacttaccccagccgtaagccattgtgtatatagatagatgaaagtagggaatagagaaaagtttgtatagtgatgaagaaaagaatacaacgtagtgcggggcgatgaggggatcttatacccaggcaagagagggactacagaatactccagaagggctacgtaggtctacggggtacgttgtactaagattcgggtatagctttctcccctctgtctcagctggagttgccccaccatccaatctaccagaatagtggctgagctggttcaacatgtatgggatagatatgtccgaggtggagcgaagacacccttccgccacacaaatcagacacaactttcagggtgttggcccgtggctgaagctggcagatgcttccgaagaacatcctagtgattattgttgcgtatcttcggcgatgcaggcaacttcattaggaccggtggtggaatcatcccaccaccgcatcgctagtctccgacttcattggaggaccacttggacgggacttcctgtcacaattcccgaattaccgccaggggtgttttagcttttgccggatcccagctgaactgctttttggtccccgggatcgatgtttggtcaagggttgccctgaaagacgctacatgcatgcccagcgttcagttcgcccaacaacggacaagtagcatgatgcactgtgtatgctgtaccaatgctgcttccgcatggcgctttccaaaaacttggacatccggtacggagtacaactttcgactcgctcattacgaggacgtgtcccaccaatgtccaatagcatgtcgatctgatggacccggatgggtcgtctcagccctactccgctatgaattgacgaataaaaagatgagacacaggataccagatccatttcaggtcatttatacggtatgcgttacgcacatgtgcagttagaaaccgatcagcctggcttgatcgagccaagcctcccttctaaggcttgtcgtcgccttaaaattctcggcaacaccagccacaagcaaagtggcggtgaacatgtaactgggtgcacttgcaatggcctcctacaacatacggaataatgagcagtgactttgtagaagtagtctttgtattggtaaagatataatacgggtgggctgacctgaaactaagtatgttgtacatagtacttacgtacggagtactggaacatctggctctaagccacactcggactaaaatagcatcactacgacatgtgtcagatcaatacactacttgattagttactccgttgaacaccaccacttaactatagccaacgtatgaagatccctttcccttgaaacaattgaatgtttcaatctctcgatcagcaatcgcgaatactatcacagtaacagtgagatcgtctcccaattaacgtgaaacccttaccgtaaatactctgtatcgtgtccaaactagtagtagtactccgtagtactccgtactccgtactatgtaccaacaaccctccgtggctggaaacatgagctctgcgccacatacgatcacagccacactccgcggcattctctgagctcaagctccaagctccagctccaagctccaactaaacttagctcaactcaactcaattcaaaatgcctaccaaaacccccgccccatgcgacttcccatccgaacttaccgtgaccatcacacctgccccacccttccccgcccgctcccaatcagcatccccagccccaaacatcctactcctactccatggcctcggagacacagccgcatcgttcacaaaattcgccgaagccatccggctcccagaaaccaccatcgtcacagtgcaaggcacagcccctctgcccttcgacctgggcggcttccattggggcgacgatgtctccttcgactccgcgaccggcgcgctagacatggacgccggcatgacgcgcagcacgaggattctggtcgaggacgtcgtgcgggacacgctcgtacagaaatgcgggtacgcgctgcgtgagattatggcgctgggtttcgggcagggcggaatggctgcgctggctatggcgcgggagctcgggctgaaggggaaggaagctggaaatggtaacggtaacgcggacagtggggaggttggtaccctctctggtgtcatctctatcggggcgccttatccgttgtcaggatccagggtcgggaatacgaatcgcaccccggtgctactggttgctggcagggattcggtggcggtttcggatgaggcggtgcgtaggacaaagcaggtttttgagttcgtcgaggtgagccggtatgctaggcggggggatgggatgccctcgaatcgggaggagatgttgcctgttatgcagttctttgcgcgcaggttacggagtagacagggtgttcctgagggcagtgtggagattagctgaacatacagcattacctgtgtaaattggatgtcagttcacgatttcgctttgcggtccgagacatgggtgtaggtgcgctggaagacgcaattgggcacatcctggcgtctggaaaatgggtgactcgataacctcgataatggtcgggaatcgacatatcgattttcagctggcgacattctgtaggtttccgtagtccgaactagtggcatattcgaactatcaaagaggggttacggcgccaatcgacaacgcacaattggtcaggacctcgcattcgtcaattttgatcacatccaagtcatctgatcttaatactctttagtataggttcattgcctagccaagctatgagaaccacctctctcaagaaattctctcacgttctaatacaccaaacccaaatcgcaaaaggtaaccatcgatgatcacagtgctcaaaactacagatatgaggctaagactgaccgcatagaacaaacaacatggcctacaacctctcaatagaggtcttcggttccggcgatagccccacacaccgatcccactggggcttcatgatcaacaaacccgggaatctagaattcggagatctcctccaagtcgaggtcgtcgattcagaccggttgtggtacggttttgcgcctcggtacgccacaaagattatcgacaaagcggctgtggggatgtgcaagcttaccgatctgacgtctcaacaacgacacgacgtgatcaagattatcgagaaggtgcctgctcctaagaattcaattggcctgtgccaagattggatttttgatgctttgttgtctttggagattgaagagtttgttccttccggtacttctgctttctggaagggcatggttggcagaccggcacgagaagttgctgctgcttgtgggacgcagtggactgcctttgcttgatacgtttatgtgtttggatgctaggtcagggcatgggattggaatgattggaatgtcagtgaagagaagataatagtatttgtgatgaattgtctcgtaactctagtatataaaacgccttggtatataccaaggcatggtatggcaagtgcccatgtacatagttaactgctcctttctcgagccccaatgtcgggtctcttcacggtccaagggatatcttcgcaaagcccacttttatgcacctatgttcaaatataaaccaccccgctgtgtactgagactcctcagaacccacagaatgaatcaagcccaaatataaactcccaaccatatctaaatgcaaccgagcacaaaaatctaacaggaatcatttcttaatcccaataacagccagattgcgcggactctggccatactcaaacaccgtctcaacccaacactccttgacagagtcatgctcacgcaggaactgccagcgatccaccacaatagcagcctcaacaacctgagagctgaaagccatcagactccacacaatactgagattcttgcgcgtgtgcaagtactccgtttcatagcgctgcaactcctcttcagacatggtacagatgcgcttcttgaccaactcgcctcggatcggatccaggctcagtttgaccgttgcagcccgtacgtacgcagagaaagactcgaatgcagacttgcggagcgacccaacgatcagcgctatacccccggaatcggggctgtcggtgtggtctttgtagagatcatcgggcacatcgggtttggggacgatgccgtgatctagaaggacgcgctgcagcagagcgcggtagaaatggcgcgtgaagaatccttcgctgtcggcgtggccccagttatgaggtgcctgtacggccattgagcgggctgtgatattgagcttaaaacctgttgtggtctttgcttggtaattttcatagagtttggacattgggaatccgtgcgggtcccatgaagatccggtctttttgaggcgggggtgggcggatcgaaggatggggattttgtatgttgctggccccaatcgttcggttagaaggttgtagcagcagccgatcatggcgattgccacaacagaagggttgagtactagtgatcggactccgtggtggaggaggtttccgcatgaatgcagagagaccaccatcacccgcgcgtcacttggtttcttttcagactgcacgatgacttcttctgtgctggtcctggtttcaactgatgtctttgggtccacgacgtgctcgatgatcggttccaggtagccatcttggatattatgttcgatgtagctgacagtgcctctggtgtcgacctccggtcgggcctttggtacatgtactacatgtggctttctgtacatcgagccgagcacatcatcggcttctagggtcatatcggctagcatgttagaggtggtgtcttcattcagctcagcaggtttttctggcactgcatcgctcaattccaatggtgctcccatattcaagtcaggaacctctggtttttccgcagtggctaggtctggggctagttctggggtttgcatgaattgcctcttcaatttgttgtgctttgcattatgcattgtcttgatcttttcctctttagccagtcgagcatgaacgtccatacgactagcaccgctgatgtattggtgctttcgctcaatggcaatgatatgcttatgatagggtgagcttgccaacatgcgcccaaggtagttctgccccgacccaaaatcaacaatgtgagacaatggctccccgcgacgctcattgaccgtctccgacaaagatgcgacatagcgagagaattgctccacctcgtgcttcttcttcttgttcatgccgatagcgatatgcatcgggagaggttcgctcttctcagatgtggtgaactcgcgacggaggctgaatcgtcgaatgtcgcgaatgtactcgaggagagatgcaggcgggaatgcgcttccgttccaagtcctgccattctcggaactagcgtttgtttcggcgggttcgcacagcgggccaatatcctcccgtagtagcagttgcaggatgctgtggatatcgtgatgctcgaaaaacgatcgccagtcttccggcagtagggatgtgtatagatcgggatcgcgcgtcaggaaatcgaggatatgcacgccaccgcaaaggttcatgaacatgaccgactcggttgcgaatgagaggagggcctggacatattcgtcgggatccttccactcatcggagagtggaagggggtttttaatcgtcatgctagatcagatgtcattaaaagcacggaataagtcgtcaattcgtagaatgagggacattcgatatactgtggggaatgttatcgcttttttttttatcttcccccgcgcgccgctcaaggccgcttagtcatgttcataggtcatttcaaggacgatcatctgaagacaccacgctagaaggagattgtcggatgttatatagcatgtgtacgcatattgcttgctacagggaaccagatggccattaaaacaatctagtcatgtcattgttcaaaggtcatgtcaaagtaagaagattaacataggacaagacgatgtgatgtaaacagaaatgcacagttgagaagggacgattcaggaacacccgtacggattcaaagtccacattcaagttgagatgtagtcggtagctgcagggttgtggaagaagggtaacaccgtctcactttaggctacctaggatagtacaaagaaagaaaacatgacaaaagattgggagggttgtattccgtgggacagtcaatggctatggagtccggatactcagccatgactttcttagagagctcgcacgagaactggactttgatctggtaaaacctgcatggacctcaacaacctggtgatgttgatatccttgtaggtaaagtaccctgttctctgcctgcactgtctcatggggctacggagagatggcggtcgagagggatcgggagaagagaagaagaggaagtggtggaggagcccttttatatggtcacttctcacgtgccagacatggcaaacaacgttaaaggaaggaacgtagcttccctcgtggtcgattgctcttgcctcgctccaggtggcaaccaccatgtctcttctcaaacatctgaaccacaacacaccgcaccagagtcgacgtacgggccatatttgtgtaccttaaagctcatcaggacggacaagagtttcagttgttcggccatgcctcagccctcgatgaatatgtggttgtatctgcctggtcattgtcgcctccgtagtgtgaagatcagattggaaggggtaatttccatgagctttccaaagttgcattcagaagagttactaacagttgattcctcatctagcaaatccaaacaaggccattgctcgatccgtataatcaccgcaaactatcattatccaaagcgctgcaacctacactatgtcaggtttaggatcaatgtctgatacctacatctttagtgagagcggcttgtaaccttttcaaaacataggcattgaaccaaggcccgcatttgcgtaaggcttaagaagagcccatatactgaaccacctaagccaagcttgctccaacgtgcggcaagaaacaatgtgcaaccccgaggatcccgtcgttccacatctagactatttccgaggaagttgaggatttgctggttaaacgtccatcctcatgcaaagagtttgtaacactgcatgccccatacttgtgccaaaaacggagcctcatagtcgatataatcctcacaggcgttcactagatccgtaatatttcccccctaatagcccgagtcgctcatactccagccgaagcacctcatcgatgatatcccaacaagcgtatctcataccgtcaacaacgtaaggagtaccccgtacttgtgatgctagttgggccgtgcgttgggccgagtaggccaaacctgcgcggttgtcctaaaatatcaccgtagagatcagtcagcaacaccgccgctccaggcttacccgtccgtggaccaacccggggccgagaactatcaacaactcacaatacccataccgcagccatggagcacgcagacccattcctacaagttcaagcgtgagctctacaccaactccaagcgcaagtccccaactaatcaacgtaccagcgatgtggtctcaaccctacaaaccagccggccactcttctcctcatacctccgcatccggtcactagccaaaagcccctccaacccagaactcaagcaagcgcgctcggagctcgaaagcacattaacagagctaacagccgacctcaacgacctcgtcgagagtgtgcgcgtaatcgaacaagacccctaccgctttggcctggaactagaggaggtgcagcggcggcgcaagctcgtcgacgatgtcggtgatgaggtcgagaaaatgcaccaggagctacagcagactgtctccaattctgccgtcgacacgctgccgaaccctaccgagtttgatgcggcgcttgaggaggaggagcgcggccggggcggggacgattattatgcctctttggagcagcagcgccagactgagcttatgcatgagcaggatgagcagctagatggtgtttttcgcactgtgggcaatctacgtcagcaggctgatgatatgggtcgtgagttggaggatcaggctgtcatgcttgatgaggttgatacgctagcggaccgagttggggggaagttgtcgaatgggatgtcgcgtatcaaacatattgtgcgcaagaacgagggtaggattcgcttttttattttcccgtttactcctaatctctactggatggacggtttggtatggtatgggaatctcaagttcaaactaacttttctgactagatacatggtcctcgttttgtatcgcagcactcattttcgtcctcgtcttattattaatcctactcattgcactgtgatgatacaaaatcaaggggttagttaaaagcaaaaaaatcaaagggggttggcgtttcgggtgcaaatggtttagtttcgagccttcttgcgcggacgcaactcactgtcttcatcggagtcgtctccgtccagttcctccatatcgaggtccatatcttcgagctcttcgccgatttggaaggattgaactggtcaaagtcagcaggggaacatctgactcgttcgggatctacataccgtagtagctgagcgcatcgggccagaggtcctcggcaatggcaacagcaaggtcatctccatcggggaagatatcgatttcctcaactccctcggtgtcatcttcctcatcctcggagtcggagtcaccggcctcctcgatatcctcgccgttctggatcttggcccagcgagcctcgatctccttggcagcctccttggactgagcggcggagacatcacggccgcggtatccgaagaatccgaagaagctcatgccaacggggctgggctcctcgtcatcctcgtcatcctcgttggcctcggcctcagcctcctcgaccttcttaacgagagcagcgaactcgggcaactttctgcggtcaccgcccttcttcttctcagcctcggcaaggtcgcaagcggcatcgagcatgcccttggtcaaatcctgatccttcttccagttgatacggacgggctcggagaccagaccctcccaggtgcgggtcttgccagcggcgttcttggagacctcctggcgccagtagaactccttgacgagcttctcgttggtgaagaaggggttctcgtcgccggtcttgaactcaaatgtgaagcgcaagctgcggggctcgccgttgccttgggcgtcgagctcgaatcgctcgacgttcatgttcttgaggcactcaccgagcacttgggcatcggtggccaggatgtactcgtcgatctcggggggagcgctagcaaagacgcgcatccagaactcagcctggacatcggggatgttgatgatctcgctgcgcttctggatcaggggggtcatgagcttgacggagtggcgcactagagtgtgtatgttagcaattgggttatcgataggtgcgcttcttaatgcatggtagagtagcctctgcgagctgttcactccataacaaaatagaaaatcaacaggaacatacactgctcaacctcagcacgggcgaactgctcttccagaacagcaatcttcttcatagcagcctcagggatgctaggcatctcgacacggtcaaggagggactgatcgttagacatgatgggtatgtattcgtgaataagggtcgtaagtaaataatgccagacaaacacgcagacttgagtgttaaagacagaagaataggagaatgaaggaaggggaaataaaatatcagaggggaggcaaacaattcagggacacggcaagaaaaaaaaaaaaagccatgcgcgcatcagaaggagaggagctaagctacatgacggtacttgtgggtacttatttttccatagttttaaagcgccgaggatatgtatctcggtgtacccgtgtgtccaccgggcaacgggcaatggtgggggtggccgcggtggttggcctcaggcgtcgaggactacatcataggctgggagatggagggaaaactctgacgctgatcttgtttgcggtggatctcaacgtggccgtgggttatagattgttctgattggtactgggtaggcttggagtcttggtatattgtaagtacatggaggggtagacaggttcgatgctggtggtgtatggggatataggtcaatgttcatagttataggtgggaaatacgaggtacggttatctgcactctacgccgtatgtatgttgtatcctgctttgacagttgacatatgcaggagcacatctcaccgtatgtctatacaaaccttcaagagccctaatgcatatattatattccaatagtaggttttggtaagggtatgcctaaagagataacgaccttaacttaccttctaaattgaactctatgttgtaaattgttgcaaattgctataaacatgcaccgccacatatctcgccacatgctaatcagatccaaatcctcatcctaacaaaaagaagcggggacagaagaaaaggcaaaaaaaagcaagcatacactccaaactaaaaataagaaagaaatactttatttcaacaacaattccttctcctgaactttcgaagagtccatctataccaggtagggagtatatatatacaccgcacaattccatcctgacacctgggcccctttgataccaggtctgacagttacttttataaatcaaccccctttcccattattttttctctcgaggtccgagtccagaacttcccctcatttgatttgctcattgatttgctcatgcatgaccccgttagataagaggagcggtctgcgtgtcgagcgtgtgaatgttcgatgtggacgcacgggacctgcaggactcgtcaattggggtcaggtcagcagacgtgaggcacgaagcacgtttgtgtcatggtatcgattaatggagacgaaaaagagtcggggtgagtccgggatttggatttggggttgttatgtggcgagtttctatggaagaggaggtgaagtgaagcgaaaagaagcgaataatggattttggaattggaaatgaaaatgaaaatgaaaatgaaattgaaattgaaatagaaatcgggcttattagcgatcgtataggagctagatcgcaggctagtaaccgaagtcgggatatcttattccatttgttttcttttgagcttgggatcgaggaggttcattgaaccaagtaaacaagaaataaaggcaatattttgaaaatagaaagtaaaacaaaacaaaaaacacaactttttcggtgatttagaacaaatatcaaatcaaaccaaccacaaagcaaaagaaacctcgtccaatgctaccccaagcatcttccgattaagaaccgaggtcaagtcatgaaagtccatatatcccatgcccgttcgccaaaaatgcaatgattagaaaaacgaaacagatcggaacaacaagggcagcttcacatgcacagaacacatcaccatgcacgtctctgcccagatcgaactgtaaaaaagataagaaaaaaaagcaaggaagtcatcaagaggccaaccacaaagacaaaaacaaaagcaaaagcaaaagcaagagtctcaaaccatccagtccagcccattagcctcttcttctacggggaacacttcacgcgcatactcttccatgtcgcgccagccctgccacagatgtcgagactcgtccgtcacccggagcgagatgacaccgccaggtccttgcatcatgcccgcgccggcgccctttccacccgcgggtccaagacccttcggcgagcccgcggcgggccgtgagaacccgggcnnnnnnnnnnnnnnnnnnnnnnnnnnnnnnnnnnnnnnnnnnnnnnnnnnnnnnnnnnnnnnnnnnnnnnnnnnnnnnnnnnnnnnnnnnnnnnnnnnnnnnnnnnnnnnnnnnnnnnnnnnnnnnnnnnnnnnnnnnnnnnnnnnnnnnnnnnnnnnnnnnnnnnnnnnnnnnnnnnnnnnnnnnnccggggtcgggccgtgagaactcgggctgcgggaagtacggcgcatcgcatcggccaaacagctcctccagcgcctcgagctgttctcgatatcccggcgggatgttgaccttgatctcgatcttgggcacgcggacgtactggcatgggcggtccagggcgcgcgagaacgccgcgcacacctgtaacggggagagggtttcgaaagtgagcgcgatcctaggtggcgggttagctttcgttccttgattctttctcctaggacggtgtctggaaatccgtcccgggtgatgattcccgcactcaccgatgtccgttccatttcttcgggccgtccttgaaaatctgcagcagcgtcggaccaacgtcatgctcggcgtccagccacggcaacgggatttccggatcgaacggcgcacgccactcgaagctcccgtctggcagcagctccatctggaagagcgggtatggcaggctcgtgaagttgttattgtagatgccggcgtagacaaaggtggagggcattccgagctggcggatgtagttctcgacggtgaacttgggcgcccactgcgggacggcgggccagggaccatgcacggaatgatccggcatactgctgtagatgtagtgctggattgtgccggcgcgtttggcggcgtctgccaggtcgtggccgatggcgacctcgtcgccggactgggaggtggtgttgatgaaggcgagctgggcgcctttgaagagctcgtccatcagggcggtgttgccgagcagcgggccttgcaggagcgtcacattgggtagttgttggagttccggggcgatgacgcctttcagggaatgtatttgcgcgcgcacggaataccccacggcggacgcgacacggatcagcgaggccgcttgccggcctgtcgcgttgaccacggcaatggtcttctgcggttgtgtcatccgggttgatcgggggggtggaggaccttggtggggggagtatagagggagaggtatagagaaagaagaaggttatcaaaaaggacaagaggacagaggacagataaaagaagagaaatccggagtaggccttggcgagaagggctttgcgatggtggggtagaagttgggaaagttgtatgtaacaagaatcgtgatcggacctaaattatgcgattggaacagtcaaggtcaggagttctccaaattgtccttctgatctgcaattaataaaataataaaaagaaggaaaagacgcaaaggacgcaaaattgccccaaaaaatggcattcgacttccgaaaacgcggagagccagaaaggataagataagaattctttttctacgcgcaccgtcctctattccctgccacgctgcatatcaaatccctttttccggctctgcgtgctatatccaaatataaccaattcccccccatttgcgcatccccgagggagaaaaaaaaagaaaaaaaaaacccacagtgcggtctcgtccaccggtttttacgtaaatcggcaccacacctgggcattttcggcagcacgggaagatcctgattcgggaacttgagtcggttgggagtgtatgatgtgaggtatgtggtatgtcaagtacttttctctatacctatactatgacactataacatcataacgcaccatacccctatgccgatcgacagaactatacaacatacaacatacaacgtacagcacagcatctatacatcacgccaagccttgaatcgaacccatagcggaaccactcccgagggaaatcaaactagcacgtagactaaatcacgcaggtgacttcatagcaccgttcatcgcgaaggacttcctgttccactgtctgccagggacagcctcacgtggtctttatcgtatatctggatgtgggctagggcttgtccaatggcgttggggtcttggcacaggttgacgtgctacactcatgtccgacttgccattccacccgatacgtccaggtaacaaggtacttacggagtgccacggagtactacggagtacggagtaccttttggcacaatagctgggagattacgtctgaatttacgtctgaatttacgagcctgatatgtatcttccctgcctgaacatcacatcattccctgcggcatgagactattttcgagatccatgaggcaatcaatttagtacaacatactccatactctatattatcttgcacgatgtgggtataaaaacacgcaaaagggggaaaaagcaaaaaaacatgcagacagccccctccataaaagagaacccagttggagtaaccccccgactagaacacttctatacaatctagaacattcagctatatccaccttagcagttagcaggcacacccctgtacggagcacggagcacggagtactaacgacactaacagcaaaccccagaaaaccgaaaatgaaaaggagagaaaaaaaaaatagggagagtccttatcttccccacttagtggcttctatccccggctacggcaggggacgatctccgcggatgaaattccgtattctagtctggtgatggtgccacagctaaaagaaggcaatagaagtaggacagggggggttttttcttctttgcgattctggcgtgatcggaatggagtgcgactataacaaaatggtgtcagaataagcccgaggttactctatggtgttctattattctatacacaatgtcataccctatattatctattctataccacgatgtcatcatcgccgacgcaaagcgcaggcattcaactaccaaattgaccggttgaagagggaaaattcccacaaaagaagacgcacctgcaggcttaccggaggccaatgccccttaaaaaaaagagagacatcatatcaaccgaagtataggtaagccatcccacataaagcaagggagcatacgacacaacagtaccccaatcccaaccccaacccctgaacctagcctgaacctagcctgaacctaccctatgacgaaatcctaacctaaggcgccgacccaggaatcatccgattcttaccagcatcccactcccactcctcctccatctcccgctggctgatctctttcggcccaaccccagccatgccccagacaaacggccggtgacgcgccatgagctcggcggctggtcgctcgtccgaatgcaggtgcgcgccggatttgcgcaggaggagcgtgtgctccgagaggcccgcgctcgcggccaggaagagcggggtgtggccggcgcgattgcggaggtgcaccgagccgccttgcgataggaggaggtgcaggattttgattgacggggatgtggctgctaggtgctgcgttgggttagtgtcgagataaggatacggggcgagggagataagggagggggaaacggtgagacgcttacgatgggcgtgttgccggaatagtcggcgtcgttcaggagccagtggtgttctctcttggtaatggcttggaccttctctaggtcgccctgggcaatggcgtatcccagcgatgtgagtgtctggatgcggtcggagagttcgccgtccgggtgtcggaagataggtaatgttgactcggtgagctcgccgcggatggatactgacatgtttttggcgacggattccggggtggattctggcagcgcgaggagatacgcgagcttcgtcaatgcgccctcggttgtcatgtcgaggccggctacgacgcctgctcgagagagactcatgcctgtggcgtagactggactgacgctgcccgtaagaccttaagatatgtcagtcatcctgattggcgtgaagcgttgggcacaactcacattgcgtgatattcacaataacaataccccgctggatagcactagccaagacgttgatcatagcgttatcctgccccgagggcgcattgcccgcgccaaaagtctccagaatcagcccgcgcaagccatccagcttgagcaccgcatccaccatctccggcttgataccagggaagatccgcagacaagcaacatgcgtagtatccagattcgtgcgaatactaaacggctccaaactcgtaggccgatgcaccatatcccagttcacattagtccgcatagaattcgtaaccgccacgggggcacaattcggcgaatcaaacgcagcgaaatcactcgccgcaaccttcgtcgtccgattcccgcggaacaaccgattattaaaatacaaacacacctcggggatcataaaatggcccgcgacaaccaacgacccgagcaggttatccgtcgcgtcattctgcagctcgagcatcggcgcctgcgacccagtaagcacaaccggtttcccaagattctgcagcatgaagctgagcgccgagcacgtgtacgccagactgtccgtgccatgcagcacaacgaacccgtcgaagagcttgtaattgcgctcgatcgcctcggcgatttgagtccagcccttcgcgtcgatcgagctgctgtcgagcagttcctcgaactcgaagaccgtgtaccgcacctggcgcccgtaggctgtcatcggtgtgcgcaggcttgggcgtgctttgagttcgtgcgcggcgttcgcgactacgttcattgttgtgctggcggagccgtcgttgaaggtcggcactcgcgccatgcatttttcttggaacccccgtgctgggatgaagccgcctggtgagggttgcatgcagattgtcccgccggtcatgatgattaggacgcgcgactcgtgggaggtctcttcggctttggcggggtccagcgttggtgtgagcgtcattttgatggtttctgtgctgagctgagggttcaggctggtagatatcatggcgaggtcagtttctgattcttgtggtttgtatcgcttggcccgtgacctgcgattgcggtcgtaattttaacgataatccaaggtcaattgatatgaatcaaggcattgatccgttcattcgccgtctgcagtgcgccacgatcaggtgaatagaattttcattaatcggagacaacgttgaaatgaaagttaaaacgttaaagtcactcaaccgcgtagatcaacgattgactcttttggcgaagaagtgaccccaattgaaccccaactcgaattacgtacagcgattttcattggtcggttctagtttaagactttgtccccactctcagcgatctcggagtacatacgtattggccgagtctgatgatttagatattctatgtatcttgaaggtctttagaataagaaacaaagcagcactagtccatgggtgatcgcggataggttaacggtacgaactcaaattatgtagttcaacgctttactctacgaatcctgagtggaatatgaagacaatgactccgtagtggagctatagacgtcattcggaagcatcgagacaagcaacgcaaagcacattggctatttccctttccacgacttctctctgtttcaaccgttttgtgtattctattgccgttaccatttgcgtcggtaatgcaaatccacgatcacagggcctagctggcataagaagtactgtaccggatagtttactatgaggtgaggacaaaaagtgtgaaataatcgatcatctcagaactagacatatgcccccattatttcccttttatcatttcctcctccgtttctctactctccacttctctcaaaaagttcgcctcgttccaaatcacccggggagtttttgctgaaacaagatgtgagcaaaatttccgtagcttacaaagcccggcgaaatcggatttcgtcttcaatgacaccatccacgaatttggtattaaacaaagcataaagcgagagtccttcattgcctcgatttttccaagttgcggttcacaatcaaaagtggtctcgtcgtcgcggaagactgcccaaactgactcatagtagcttaaaagcctccctcgatgaatgtgccagcaaaggtcagattttgggcacacggcttctagaaaagggcaaatggaattcaacgtcggcatcgaaaagcctggaatagttagtaacaatatataatgtgggaaaggatcaataacaactgaccatctgggcgatgggcgatgggggattttcagcatgattaactctaacaattcctcctctttatcgagagactgccagagtgcgtcatcaacagaagttccaggatttgattctataaagtaagaacggatatctcgagaggcggctctagacgcttgttagccctggtataagatatctagtcttctttcttaccgatcctggatatcctttaggacacattcaagttcaccatttgataaacgacttaaaggccgaggtcttcggcgatttacccgaaaaggctgtctttcagagaacgtgtacgacgcggagaagtcatatagaactgtatcgtaaatgtcatcgggaagtcgaaaatgtatatctccatgggttatcccaatccgatgcagagcatctaggcgacgaagtcggtctttcagtaaagaataataccactcctgttcaaatggacttagagacatcatctcaggagtagtccaaggcgtttgtgtaaggatcgtcgcgaagcttttagatagttggtcgatatcttcactaagaacacttcgagagcacaattccggtcttaatgcctctagcacaaccgctcgctcgtggcaatatccaaaggagaatcgagattttgacatattgataaccaccgcatggaattgtgggaaatatattctttcacgggtggaacagaataggtcaatatggttcgagggagttgctccgccgccaattcgtacgaattaaccggcaagattccaaagttttcgatgaacacgtcgagaacttgatttccaatctccgctctgaaactgagcgttcacggtgaagacgtgaaccgtttccgccccgaaagatggctgggtccagagtccagagctagatggtgttggctgggtgtttatgcctttccacggagggccaaggatatgtctaggcagtaagtgatttagggtatgagagcagtacgtagaacttacgctgactgaattggcggaggaatttgcactgacggaagcttcgcatgcaatcatacgaatcattcagacattccccgagcttagattaccatctgatacacctagtgttccacctggtgaggaaaagcaagctttgacgattgtggtgatgagtgcggaaggatgtaaggttttgttggactgaaacatgtacattagacgataggttcatgttagccagatttacaactagaatatgaggacctctgagtgcaaacgcatacactgagctaaaatatttgtattaaggctatactccaccgaggcaaaattcgctacccggaactttctccgctattctcgtaggggacccaggggcaccccattcatgggcttggccaatctgggcgttggtccaacacgaatattcgttcagcatggcatcggaaacattggcaatgtccgatgcatcctctagcggttcgcgagagtaacggattgcccgtccacactggtcgaaccatagcgcaagaacagttcctgcgtcgaagccttcggaagcaagggttattgcatcaacgatatggcgggcagtggaatagtttagttggatacgtcttaaatgaagactacgaggaagaaatccatagcatctcacatatatagggcagtattctggaacaattaagcctaatagtaagcgtgatatagcctgaaatactccgtagtcattcgctagtctcaccccggattaaactgcgacaaatcctcctccaaaagccccatcatgtactgattcccccagaaccaattccccaattgcgcagcagtccccgaatcctgtccctgcacttgagatggatcgagcgccgagaaaccacccccgttctgctcggatatatccgccgagctgacatgcataccgggattatctgtctggaaatatccctgagagtttcccatctggaaggcaccactgtttgggggattcatagggtttgtaggcgctagtccgagagcactgaggtacacatcgaattcctgaccgacctcaatgagatcctggtcttggtctgccgctgtctgggtccgtgtgttagcttcgtagtaaaggcgggcgacggtgccgagcactgagcatagggtgtgtaatcggtcgacggattgagagaaggtgcttagcggttggagggaggcgatgaactcttcgagtcgggcgaggtcgtcgccgttggactttgttattatgttgcagaatatcacgatgaaggggacgaagggggataggaggatgcccctatattagttttgtgagaatttggtctgagagtgtatagccattgcagagacagcgctggttgggatcatgagtgcttaccagtgcatgtaggagattttcatgaaatcgtctgtttcgttgagcgctgcaacgcactgtcggtggatttccagggcttcccgggctgtctcgatgcattccggtatgaaggtggcaacagaccccggatctgtggatgctggaattgctcggtagatcaaagtcatgatagccagccgacttactttgtcagttgcaaggtacatgaggtcgatctcggatattttaagatcggaggccatgaatttctacatgtttcacgttagcaactcgactcaatcaaatccacaaatagcaggaaggtatacctcaaacggctccatgaccttcgactgcatctcagcggctaatctatgtgcatgtgtgactcgttcactttctggtttctgcagcgcctctgggctgtacaaatattggtaaacctcactttggatgattgccgacctagtccaccatatacagacaggcccccatggataaggaacatctgcgctctcatcgagcggcggtaggctgatgtcgtagttctgaatggacgacgcacgtcctagacgcagggacatcatattcaaaattgtgtagaccgaccagaatagatgttgcttttggcgttggactgatatgggatcgtgctccattgaagtaatgcgatgatatcccagtgtctggcacagattcatggccgttgatgctagcgtccaggcaactgatggcttagaaatctcgagtgcatgcatagcctgtattggtaagtaaggagtctacatgggttatatccgaaaaggacaaaatggaaagggtgactaacgcctagggccaacgccatgatcgactcatggcttgcaggcatcaggatgttcaaattggcaagcgctgtctctaggttgtcgcgacacatctcaatgcagtgccggtgctcctctcgcgaactggcgtctctctccatgccgccatattcgtagagagcgctgtacaaacaaaagttggttacaacaaatgccgcatcggagtaatcgtctatgcagaagtagacttcacggcatttttcagtgaaatatttcacactgagaaaggggacatagccaccaaagaaggccggtggtgtttctggatgagtaagaataggaagctggagacgtgtctttggaataaaccgcaccttgaacttttctcaatatgtctagaaccaatggtagaggcggcatctccagatcacggatgtcgcgtttcacacctaacctcgcattcttagtaggaagttgactcccctgcgagtctgcttctcgccgttggttttggattccaacaagctgcttcagcgacgagagagccgcgctgatcttcggactggacaaaacctgcggcgagcttttggacacggcagattcaagaaacgcgctagcgtaggccccatgggcagtcagcgatgagctgccctcaaacccagagctgtggtcatgctgctcgatagtaggattcgctagatacagaggacccttaggctttgccgggttcgatgtagcgaatgacggctgcgaaggggttgacttctgaggcgaaggtgcgaaatgagactcgcgcgagtttagccctgtggagccttgtagttgagatgtattttttgctagctgttgaagagtactttcaatgcttgccaggcgttcctcgatcaaatcaatctttttctcactgtggtcgagtcaatggttgtcctatgataggagaaaatgctcatactattgatttgagattaaaacccgccgtcggggctctggtggcttctggcctctgccagtagatcggcatacaatgctggagctgcgacagttggaacatggcgtgcgcttatcgcatcggatctgtgacggcgtgagatcgaatcatgatatcgtgccactagagttgcagctgcatacctttcgcagacggcattgatcacactgcatgcatcattaatatttgattagccaaagccgtatctttcctttctttttctaagcttgcaactgcttagttgtggagcaacacctaccgcacgtcggaccagcgcgcttggcacatcctgtccctcatgatcggattcctcgggctccatgaattttcagacactgcgtatctagccttgaagtgtaacatagaaattgctagaattagagacgaatgaagcttcaaattgcgagcccgggcttggttgccttggccaccggtacgatcacgtggtaggacttttattgagatgcgataccagagacatatatgaatatattaaattttgaggttaatcggcagatatgagcgaacataatatgtgatatcttcatttaacgtgaccagtcatgaacgagagtgacccagcaagcgccgtgcctgttctattactttaatgggcacagcgcgtccagcacacatgaaccaaagtgtataatcaatctatcttgcaaagtgtggtgggatataagcgcgaaaacaacctcggtgtccaatgcagatctatttcttgggaggcgcagggggccaccacgcgccatcgctcagccagactcctgtcggactgtaggatccagcctcggaccctctcaaaaacgcgaatcggaaaaataggtcttctggttcatcatcagggtcactatcagccaaaagaaccgatctaggttcaatgttagtgtccaaatcacgattgactagacgaggatttgtttgtagctccaggccatcatggccatggcgatgccaggtgaattccccgcgcttgtcttcgtcgagatagccgcgccagcgctctacatcattgagaagaagggagacgccgtcgaccgctaggtcggccatgcgatcatgttcccacagagagaatgtgatgttaccattgccgcgataagtgtgattcgaatccaactctggaagggagacattcacggatgtggccgtgatattaggataggtagcaccccaccagccatggattccatctccaagtggcgcttgctctcctagggctgccggagtctcgataattgaggcgaagccccaccgcgcaactccattgatgaaaagacccagcagcagaccctggtagacaagcgagggccgggtgggaaaggcggtgccgggcatgaggagaatggcgaggatataatggtgaattcgaaggcgaagcccaggaaggggaagcaaaatcaagatgatgacacccatggtaccgtatatcttcaaataccgtgggagcagacctccctggcgaatttgccacgcctggcttaggataatcgaaatcacaattgggatgacgagagccaatgccaactttgcccccggttgtttctgaatgtccattggagttagacgctgcaatggaatcaatcgcgcaaaggtatagttgttcagggctccagtgaacagtggaggtaggaaaaggaacaactttgacaactggtagataggcgaggatatcggctgcaacagcggcgcagcacagaacttgtaaagtacgtagacaacaaacgacgctggcagcagtcgtgacagaagactggagacaaggtcggccaagaaaggatacgagggcggatctccaacaagtcccgtatggcagaacaccatgaagaatgtactgaaaaacagcacaggcggtgaagtacagaagagccacaggatgccaactgctgcagcagtgattccaagaagcgtccagcgtggatcggaggggcagctagcttgtggcgaggatagctggagaaagctgaaagccttcgggaatgtcgatgggaacccggcagagagaataccgtgttgcttgactgatgggaaagagtgcgctgcgccttcaagcttgacgacaccgcatccgccatcgttggagattgcaccgacatggattgctgcctggcagataaagctatccgcacggtaaagtgccgggtcggagccatccggcccaggccctccaatgactaggccttggtagttgtacgtattatttcccacaacgtaaggctccagtaatttggtatcacggcagttcgcaggacaccggaagggaatagttgatgaagaaaatggacggcagtcgtttccgttaataccacatccattgtcgacctccctaagcaatcaaatacatgttagcggattttatacctagatggcgcttccatttccgcacgtaccagaagttcgtcgagcaggacagcgtctgaggccgaccgtaaccttcgatataaccggaagaacgcgagtgtaataaaaccaaaaaccaaggcaagaaccaagataaatagagcagcaataagagtaaagtcttaaatttgcgctttgggaagaaatggtcaaggtattggactggaagttcctggaatcgcggaaacagaggtttcaacagaagcatatgcgggggatcgggacccttgacccaattgacggtggcgcgaccgacctttcggagcggtagcggcacccatccccagcgaaacgacttggatgattcttgcaaccagacgggaagagtgctgcctgcctcaacgtccggcggcggcaggtcttcggaagcttcgggatcgttcagacgctcgtcatcctcaagcagcggaggaacatatagcctggcggcttgctctcggccctctccaaacatggcgaagcgttggcttggagagtgtggtgtatttgaagaaactagaatgaacgcaacgagcgattgggtataaggttgccagtggctgaagggcgctagcggtgcgataggcagtggggatctccgttaattgatatgtaaggcggaatatcaccagggacgtggccctgaagcgaatagagcgagctaaccgtgttagacctataacatgaagagataggcgatataaatacaaaaaagacaaaggtatgggaagaaggacagacgagatccaagatgagatctggggaagagacagcgaaggcggatcccatcaggcggccaaggcagccaggcagccaatcaggtcgacccgtgtgatggtgtccacaggtggcaacacgatctctccgccgacaacaatctatcttggggtgatcttcagttcggagaaatttgcaaaatattgcactaatgcagggaaaatcttcggatgtgatctgagcttttgaaactatatcgtcgttccaccgtgctgtccgtcctacactgtgtgacaacaaggccagggatcacagccctggtactgaacgagggaaaagacatgattggttgagttcctagggctttctgagaaattgaagacctcggttccatctgaactggtacacttgcgtatacgggctactactcttgggcagtatccacgtatccactccatcgtcgccattctgacgttgccactgccaaaatagtatccatgggaacaccacgtggaagccacctggatgtacaagcttactcgcgtgggaagagcctgactctgacggtagcagatagaaccggcagaagaaatatggtacatatagctacttatggaagtaggtaggtattccctggcttttcccttcttcttgttcttttctttttcttttcttggttttttgtcttgttgttaacttatcttgttgtcttgtcgacttggcgataatttggtaccttgttgaggagcaaggattttgttaatacgccgcaagggtatccaggtgtcaatatggagaagcccttcgaatggtggtcggttgagcgttgatgtcagaaggtggtgtaagtgtttattttccagagtcagggtcttgattccctttgttgtattgctccaagttgtaaacagtaaagtcgggtttgaatcttgatgcacatttcatatcttgcagcagcctcgttatgctcatttccgtgcatttcagatatttcagttgccagtggttgagagtataagaggaagtcggatttgcgtgaggtcatgatgtcaaagtagcaaagcaaagcaagattgaagagactgaaaagacacacaagtcatgcgaggtatgttaggaatgccctgcttggttggaaagtacccttaagctcaatgagaagagcaagaaggccttgtgatgagagtcacatggtgacagcgggttggcaatgtatgaggctctgcatgtataaaactctagctaactgctatagacattgaagactgtgagcccatatatctaaaacagtcagccccatgaggtgacaatggtgaaggtcgattggaaatatagatggaaggagtaagggtgtaaaaggatactcacgcccttggattgacgccaggcccaaaagcgtctggaggttcaacacactagatagataaatgataatcattttagtggactcaattccatggtgttttagttgagctatatggcatatgccaccactcggtacggagtacggggtagtgaactgtgatttacgttgaaatatcaagcaaagccaagaaaaactatcaccgagcccaggattcgaacctagatcgcctggggtcctaatacggaaaaagaacgccaagaagtggcagtccatagttatcgaaataggtgcctgaatgcctgaattaactgtggggtcagccatggactctcacaaataattaaaacctcaccccgcacgagcctcaagctctgcaaccggcatgatgcctctagtttccgaaaacgaagagcttgccgaagaaatcgaagccgtaaacgccatctacgatcccggaacagtaaccgtaacgcgcacgaccccggcaaatgcgacaaccaacacacttgacctagggagtcccgcgcactccaataacaacatctataccacagtggtcaccctccaaatcccagaacaaccccacctgtcctttatcctcggcttcgaagcctcatacccagactcccgacccgccgtactgggaacagcatcaacagccgcacgcggggaaggcaagatcgccatcgatgtattggaggagatcgtacaacggacctggcaggccggcgctgtgtgtctattcgatgtaatcagcgaagccgtcgatatattcccggaattgagtatcggacaggacgatgtcggggactcgtctactcagacaccaactgtcgacgcgtcgtcgaccgccacagaggcctttggagctctgtccctgcgcgacgccttcggcctcgatgccccgcccgaatggatcctctcggatgtggtctccgagaagaaatcggtgttcgtgggccgtgtagcccgtgttactagtctagcgcaggcgcaggcttttcttgatcatcttacggctacggatcggaaggttgcggccgcgtcgcataatattagtgcttggcgtattcggcacaggaaggatggggatggcgagggtggggagactgttgttcaggattatgatgatgatggggagactgctgctggggcccggttgttacatgttatgcagttgatggatgtgtggaatgtcgtggttgttgtttcgcgatggtatggaggcattcaacttggtccggcgcggttccggctcattaatgatgctggtcgtgatgctttggttaagggtgggtttactaaggagcgagaggaggctgcggctgcggagaaaggaaagaagaagggcaagaaatgaggggactggtgatctccctggtgatttttgatgctctggactccggagacccccaaattgaattcatttatatggggattctggcccgcctaaggcggacatgatgaaacacccgggtccgcatagccagggtgcttgatgcaacctcgaacaggcagcaaccgcactgcaactgcggatacaactttcctccttggaaagtgtctaagactttatgtcttatcctaagactgggatttacgacaatggcaaattagtggtgcgtggcccgtcatgcgacactgtctacgaagtactgacaacaggtaatgctgacagatgatccaagacacagtctagcatacgatgaaagattttgccaactggatccagacaaagtcaggccagtgcaatgagccattcagggccacaacctttgatgtctgttccgggaaaagcagcaggcgtagaacgaaccaatcacgagccgtaatatcattgagatttttgcatccaccactactacatacatagcaactttcgtccgaagtgctggctagcggttctttgcctaggaaatcgccttctcatggtgcttgccggactgacatagttgatagttgtttcgcccgatgctccgcgattcctcacgttattaacccttcatcccgagacgctttgtatgtattcatgagatcttcacatcttccatcgttgctgcaggctgcaatctggtctcacgcaagaccagccatgccgcgacaaaactgggacttttcgcctgaggctggctgtgagtatggaaagctgcgcctctcgcataccattgctataaaagattgtagatatcctaaacgggtaaaactgcttacaacagtgggtataattcaaccggccggagccgggtggtggaccctgactatgttggaagagcaattttaagcgattcgcaaacgagaaatccactgccatgaagccaaggaaggcttggccaaagtcaaccagcggagccgaaggatcgacagaagcattcaggaaacagcaacgaggccatttccatgcaactgccagttagttagcggtgatgactaccctctgggcactgtgcctagatagcgctgcaatcccgctggcaacaaaacacgttgccaagccttggcaggggcggccccgcttctaacggggaactcttgggccctgtgctgagatttcccaccttataatattgtatgccggcaaggattgagggtctcacatgttctttcattcatgccagtatgtgattgactctgtgtactagcgcatagcccctatttttgtgtgtcttgttttcgattaccaaattcaatccttctccgcatcgtctagaagaatccacgggttgtcccgcacccttgcgcgtgctcatgatctcagatgggtaaactggacccgtgcggacccctgctttgcatacgagtttttcggtgccctccgcaacgagagtcggtggctagtgagctgggtcctgacctggcagagttgcgaagaaaacatcctctcggcgctgatatggtcagcaacatgtccacttcggcaacctggttcactattcgtaattctgcccccaaggtggatctcgttgctgctacagccaacaagacatgtccagggcaatatggcgtggcaatcaatatgactgacaaaactgtggaggtcccacgtgggtcaattggtctggcggtgactacaccaatgacacatgcgcagtggtggtgtccacaccgaatcccacgctggatccttgtcgcgtcgaaattgacaagactattgtcgcaagtatagaggcctctttgaaaactcgcttatgcgccgattgcctaaggatgacaagaatgccgcgcaacaaatggctgtggctggcgtatcctgcgtgctggctgcatttggggccttagttttccttcttccgtgaccatattcctgcgttagtcctttgatacccgatgtcctactcttgctacaaggctgtccctttcagccttggccgtagcaggctcctaatggaaaagtagatgccagacatctcgtagtacaagatcggtttggctgccgggttgacattctcttcgcctctaactctcgcgtagcaactgaatcgagcttgcgagttggaagccacgcccataattaggcgctcgcgaacgacttggtcaatgtgacacgtcggtagcacaccgtgtttggcaacatcgatatcaggtctttagtagccacgtaggtagaacatgaaacctccttcacatgtaaatcggcatacgaacggttagttccgggtttcatgcccgatttcaaggatataccgactgtaagcgcttaaacagaaatacaacctcacgggaaaagagccgaaagtgatatgcggatggtttgattgcgatagatcagaggtttaactagttaattaattagaaatagttaagaattactaataagaattaaggagtcacatttaaggaatagtggggtttgcaatatattaggtcaacatatatcacgggaataccgaggtagacgataagattaacagacaagctacaacgctgaaatgaagctcaaccctttaggatttcatttcctagatcatgaaagtccatatattctacgctataggctaggcagccagtattgtttgaaattttagggagcgctaactcggcgatttccactggcttctatattggttctacggagtagccgagttgagactaagtgcatttggtggagctgcgtgatcctacttttaactgctccgtaatacttttaaaattagtgagatctctggagatcttgccaagattgacacattcacattgctaaactaaaggggaaagacaaagttccggtgttagatagattggaaggctgaagagacgatggcttgggttacattgtcccactgcgtcattaagggcttgaagagcactactccggtgaagatgaaacacacccgtcaacgttggcaacagaagaacagcgccaatagggagttcatttgccagcggttttgatggtgcgacgaatccaggggcttgtctgtgcggtggttggctcttctccagccgcccggcttagtcccagcgggtatcagcgagaagtctctctcgtcttcctactggtcgtctttttagttttcgactaggaatcagctttgcactgcaacctctgaacttcagtggacaaaatgaggggggaaataggagtctgaaacatccaccccttggccttccccactatctccgtgatgtctctgcactttcagacgtgtcgggttagccactcagaggctgggattggggatcttcgagaggcttgcagggcccgagagacccatgtctgtatatataattgacgccaacgccatccctctttttttcctttgcctttacctccattctcttcttacttcgatcaattcggcattcaggctagacctgtgtcactttccttctttccatcgatttttgcctgtggcaaaacatcatacattcctttttgaagcccatctttgagacaatacaaagacgccctattgttcatcaacaaagaacccgggaaacacttccgatacattgaatcagtgtgtttgtttcattcactctgatacaaaggtattgtctctcctgcctttgtttcatcgttgcctcagatctatatacgtctgatctattgtgggaaatctatcatctattgaaggggacatctatatgccttgcctacaatagacaataggcatagacctatcaatgagacactgtcgatatatatacccccaagcccatcatgttctctgttcaagtctctcattccatgctaacatcctactacaagatccattcctttctgacatctgattccattcgtctggcacgaatcgatcccatttgcaacatttgtctatccaaaatctcaaaccccaaaaatttcaatcagccaagatgtttatcacctccaacttcatcgctgccctgatgggcgcttccatggtcaacgcccacatgatcatgagcgtccccgtcccttatagcaaggacagtctcaacaactcgcctctggcagcagatggcagtgacttcccatgcaagcttcgcgataacgccttcgaggctcccgagaccgagaccatcatcgcaatcggcgagtcgcaccctctgtccttcatcggcagcgccacccacggcggtggttcctgccagatcagtctgaccaccgacctgcaaccctccaagacctccgagtggaaagtcatcaagtccttcgagggtggctgccctgccaatgttgatggcaacatgtctggcggcgccgacgtcgtcgatccctactctttcaacttcaccattcccgacggaatctccgctggcaaatacactctcgcctggacctggttcaaccgcatcggtaaccgcgagatgtacatgaactgcgccccaatcactgtctcgggtggctcctccaagcgctcccctgaggaattcgagaaacgcgctgctagtttcccgcccatgttcgtcgcaaacgtcaatggctgcaccaccccggagagtgtcgatatccgcttcccccagccaggtgacgatatcgagtatgacggtgaacccgctaaccttgccgcggagggctccgaggcttgcaccggtaccgctaccttcggcggctccgctatcactgcttcttcgagctcctctagctctggctcggaatctggctccagctcatccgtcgcttcctccagctctacttccgcccccgcagagagcgcctccaccgcagccaccacggtatccgccgccccagtcccagaagctacttcttcgagtgcacccgttgaccccgagcccgtggcctcctcaacaactgccgcagctcccgcgacatcctcttcgtcctctggatccacctccggtgccctgacgggtagctgcagtaccgagggtgagtggaactgcatttcaggcacctccttccagcgctgtgcttctggcacctggtccgctgctcagcagatggcgaccggcacggcttgcaacgctggtcagagcgaggagcttgttatcagcgctagtaagaaggcgcgtcatctctccagcatgcgcttccgtaatcgcgcgttcggtgttcaccatgcccactctatctaatctagttagatatggaaacagtccgctagtttcggatacacttcgtccccatcacgaatggtttttttgattcttgtctcttattgctctttcatttcttctgggctggtcctttcgcttttcggtgcattgtatgttcctttcttcctgtacattaagagatgagaccaggaaaataggacatctcaaaggtttcgacataaagatatccttgtacactgtgttgatcgatgttgtagcatatgtaaaagtctagggtttgtattgtcagcagtctgtagagcttattgctcaaataatagtgttgtttgtcaatgtccattgggaagcttgatgatagacaaagtcagctgcagaaataccactgcccacgagtttagtgggtcttgacaagtttctagatgtagaatcaaattgtagagacagacagtcacatcttcagcatgtttgcctctactttgagtaacggaacttgcttgacttcaatgttgaggatcgcacctgccagatatggatagacccacttgtggatccacgtgatagctcagattagctaattgctatatatcaacgctagtccacaaatggcaggaagggcttagggtttgccgccccaccgcattttctcactaagcgaaaaaatccacaccgagttgtgaagccccccgactcagacagattggatcttcaacctcacctcgacaccgaccagcaacaatggcctctcgcccgactgtctcgatcgccacggctgcgggcaagccctccggggcctcccacccccttcccactgtgttctctgctcctatccgcccggatattgtccagtatggctcgccaaaatcttgaagcatttacaaatcaatggaggggaagtgctgaccgtcgctctacaggcatgttcacactggtatggccaagaacaagcgccagccctacgccgtgagcgagaaggctggtgaacagacctccgctgagtcctggggtaccggtacgttattggcacatttttcgagattggaaggattggatcgaaatttgcgaaaatttcgcgatcgtcaaattcttctctattgagagcaataactgacagaattgcttttcatcgaataggtcgtgctgttgcccgtatcccccgtgtctccggtggtggtactcaccgtgccggtcaggctgccttcggtaaccagtgccgttccggtcgtatgttcgcccctaccaaggtctggcgcaagtggcaccagaaggtcaacgttggccagcggtatgtggaatccaattcgacgaatcgaacgcctagagaatggaggaactaatgaacccgcgcctacagtcgtttcgctaccgcctccgctctggctgcttctgcttcccccgctctgctcttcgcccgcggtcaccgtgtcgccaacgtccccgaggttcccctcgtcgttgagtccaaggctgttgagtccctgaacaagaccaaggccgccatcgccctcctccaggctgtcggtgccggacccgatctcgtcaaggtccagaagtcccgcaagatgcgcgccggtaagggtaagctccgtaaccgtcgcttccgccagcgccgcggacccctcgttgtctacaaccccgagaccgacggcaaggacctcgtcaaggccttccgcaacatccccggtgtcgagacctcgcccgtcttctccctcaacctcctccagctcgcccccggtggccacctcggtcgcttcgtcatctggacctcctcggccttccaggctctcgaccaggtctacggcaccaccaccagcccctcggctctcaagcgggattacctcctgccctccaacctggtggctaacgctgacctgacccgcctcatcaactcctccgaaattcagtccgttctgaaggcccccaagggcgaggcccgcaccaagcgtgtcaacgtccagaagaagaacccccttcgcaacaagcaggtcatgctccgcctcaacccctacgccgctgcctactccaagcagaagcttggacagcagtccgtcgatggtggcaagcctactgctcctgccgcggctttcctcaacactctccacgaggattaagcgggtctttatttgcccctgctcttttctttgttaactgtgtttcgttggcaaaaccgtagtcagcaaaaatgaatcaatgccttttttgcaatacccatgggtctatttggagtagtaatgtgatcggttttccgtgttcttctaagaccctcgaattttttgtatcgtgcatggtaagtgtagatgtaatatggtcgaggttctgtctaagatcatcgtttatatggaggtgaatgtcaacccttccgctgattacaacctgactctgatcgagcatgatgactgcctttttcaaagctcaatatgaagaactagatctcgttcttttccacggtcagtataaccttactgactagcagccagacacttctcctttcctctccttttcaattacttccagcttctatccagtgaaacagattacttgtctcttgtagattaccggtcgctcgttcgacatccttatatcgtgaccggcaactcacttggctatccttggtggtttgcaacgtactcgccatgaattcaggtgtctagtttcatacgaaacaacagacgagaggcccattatttctttgtcgtagaaccaattaacacctcttaaataagaggaaatttcatatatatctgtacattgacatgactattttccattattgtcagaaaatatgattattggaataaattattttcaacatctaagtatatagacggaggtgcatataaaagtcaatacgtccagagtaaccatggatagagatgcggctccttttccgcaaaacttcttaaagtacaattataccgagggattcagaatatctcaattgagactggacaaatactcgaacataattgacaatgtctcaacccacagcgggaaatatcacatgccaacaagtttccttacagcccacttagtaccggtataaagtataaacccgatgcaagcacggaaactatcccaattaattcatgcagataagccggcaagtcaagtgaaacatacatcatgacttgctgagttagcgcgagtggttcgataaaaagcagcttgtaagatattgattggtgtcgtggttattgagtttcggcatttgcagaggatagatagcaatccaaagaaaaagccagcattactgaaacacgggatataaataagcattccaatgtcttatttcggcagcttcacatgtcactgcttgtaatctaattgacttttcgtctgccccgttggttccttggaaatagataggttttaggcatatatacggagttccgtatagcgccgggacgtgaacaatggtataaagaataaagtttgtgttcccttctatgcacgtttctatcattttcggagttgcgtgcaccttgaaagttggtcctgcaacaaatatctacgaaccctctactccgtacggagtacaacttacggagtacaacaacaacatactccgcagggcacggatcaagctcgggaaatcccaatgtcaatgccgatgatcacctaagcggaatacctttttggatgtcgggcacggagatcagggacgtgccggggtagatgccaaggaaaccttcaggccccagggtccgcaggtgatacatacataactagtcgcttgcgagtccgggatcttacgtcagttaaagagctttttttagtcctgcatgttgatgctattgtttttactgtttgagagatcacatgtttaaggctgtatgttgatagttagagtatacggagtatatatacagcctttcaggaatccatggatacatacaacatagttatgcaagagtctgggatagacatgtattctagtaaagccgcccaatcccctcagtcaaatatgcaacactaatcaggaacatatagccgagagatcctgaacgccccaagccgtgcgatcggagggaaaaatctccgatccgaagaaacaaagagaaaaaatatataaaaatataaaaaagaaacgaaacgaaaacgtgtaaagagcgctctcggtaagatcaaccgacggataacctgcacgagcaaggagaaaaatctaccttgtgggtaaataaacgcccgggtctcgtgctggtctctattcgcagatcacaaagcgggtgcttgtctaagtataggcatgtctcacttgagcagctaacacaaatcagttcaggggtgcagagcgtgttggcgctatcaagagtcaatcagacactagctccgtgcaaaacatgttgcagtagtaatgttgcaatacattagtgtctaggaggaatgaacacggtaggtttatactcctccgtatagaattgagaagtgtttctaattatttagcttatttctttgttccgacggcaaactccgtagaactgttcacaaagtaactagaatacataactagctgaataaaccgaataaactcagttacttcatgtggatcattgtacaggttgtctctagtcgctccctatacaaccgatttcattggacttctacgcggattaatcctccgcccaacccaaaaatttggagtctcggtatttgctcggagaaactagatgccgtaaaaggaggctactccgtataggaagctgacatctctaaactgccgagtcttagaggattaacggcggaatcccgatgtcccgggtaactcgcgtcatttcacgggcctttcctagaacagaaaacgcacactccaggggctgagaccgtaccagacgatcccgaaggcttgcagatctgatcgccagaaattgagactgacaacgtattacgtggtcaattccagagttgcatcgccgttggactaggatgtcgagtggacacttggaagactagggttccctgttgaataaagaatgtggtaattgtacgggcatttcctataaaacactacataatctgctcgtaagaaaaaaatctgcatagatacccatcctgggtagttcgctccgaagaattagaatcctgagccacaaaataacctctttaactatagagtactccgtatattagttccaatttggaaacttcgggtgcacaacagccactccacttgcggacctgcttgcggaccaagtcgattctcaccatatccaaacgtaagataagccctgcggccccgacactgggaggagattttcccgtctaggcatcgaatcgcccaagccaccatccgaccgaagcccaagggacccactgtgagggtattcgcggtattatccgagtccaagcttactgcgctttttccccttataatttagtccctgctctgcaaattctaggtttgggcgtatataaatcttaccgagtatacatacataccgatgtgcttctttgtctacctgggtggatgcccgtatccatacccttgtgcatgtatcttgcacatgctggttccaaaccccgaaattctcccttgtgcgcgtctcatttaaatgcttactagggcatgaaattggtcatgcttagaagtacttgcagagtgggtatgcaaggccttggcgcctaaaaggctagaatgtatggagtacgaatatgtaatgtagcatccttgatccctgtggaggattcgccattaatataaggatgcggcagtaaagcggatgatattcggggagatttccacatttcccctatgtttttcctataatttcccagatatggagtatctagtactcttcccccacttgagagaatcaatggtctataattgtcgttcacgatcccgccgcttctatgtgatatgccaagtttgaacacccaatgccgatgtcatatacccactttcaataatgatcctttagaaatctctccaattatcttcattgggctctctagactaaccttctaagagacattgtagcgccctattcctaatgtggcatctttggagccgcctaaaccgaaagggctgtaactgtctcatttcaatttcgttttgacgtggagaaggctgtagattgagttatattccgagcagctaaatctgatttatattaagtaaaggtgaccgttagtacttttggtaattttgatgtactcggaatacttgcaatacttagaatactctctcttctttggctctttttcgagttccatacctgaattcccctcctttctcatctttgtccattttgacactttcgttctattcgagcctcgatttctttaggccatttcgttcctttttctgggatccttgctataatcctctgaagaaagaattgcttgatcctgcaggaggggaaggctgaggctcgacatcgggaaaggttgacttgcagagaacgtcaaatccatttccactcttagtggaatctacgaggcgctactcctagtggtcttttcccctgtcagggtgccactaactagtgggagacgcttcgaggctattttgtcccataagctgtgtgccaccatcggccaccatcgaacgttccggttatcgtctttgctatcgtgtcatattgcttccttttttgtccatcgcacatctatttgggatttgggtattgaagacgctttcggcgctattctctccaatatccttggtggtatacccacccgttgccgccactaatccttagctcttcgaggatctgtaaccgagatctcgctgccatctgatctcccccgctccaccacatcctagcattcaggagtgatctactgggtttcaagcgggtttccattgttgctaatatcccggcccggttctccgtgatcctgtaactttatagacgctcgtgtcaatcctggcaaatccctggacgttggcacaaactaccgggatactgcagacaccctggcacgaaaaccatgcacctgagaccgtgactgctcgggactaatgcgagatggtggccttttaagctagcttcaatttccttccctgtcgcagattggtgtgggtggactatttcgagcgccaatattcccatcaacacccgctggaatcctttgtacaaattcctctccctcatcttcgcttcgagcttggaatgtacacgatcaatccatctcgctttgctgccacctgatccaaatttgtccgacactccactcaattctatcactgtaccttgaatatcgaaaattaaattggtacgtgaaaagcgcctacgtcccgatagagagagagctattgctaagtcgcctggatcctttcaatagatacccctttctgggacctgaacaatccaacagaaagccgaaattcagccgaagacgatctcgttgactcgttccagaccaagtcctttccttgaaaccatccgcatttaaggacacaaagccaccgagcacatcatcacactggttgttgtctgggtctgttatgtagatggtcaattgtgtaaatcactctgaccccacatatcattcgccatgccaacctcccaaggatcaagaggatctggctccggttctgccataggcccacgttgctacgttggacccttcggtcgtatgttacccatagatggcccatcctcggagcagcaacccgagcttccagctaatttacaagaaaccggggaacacctataccagcttccacccccgcgggtaccgactagtttacaatttggatctgatccctttccacggcagaaaaacagtcccgagcgcaaagacagtggatcagagtcccagaagccggagcaacttccctccgtgaggcagatactcactccaacaccggggacaaattcattgcaatactctcaaccatttgcaagttcgacactcaacacaggacgtcgtggatctgcataccctcactatcacgatccgactttccaggttccatcatctgcacctgatagaggccgtgctgaatctcttccgcaactgcacggtctgccttcattgtcacaagtgggtctgcagggccacagaggcataagaagccagacaccgacaagaagtgatccacccgctgcatcttttatacagctaccttttcacacatcctcgcatggtcaaataccaaatggggaactatcatcaccggaaagttcaaagcggtcaaataaccagccccttcgccctcatgtggtagacgagcgagtcatcgacggggaactttgcttcgtatatgcagacggatcgtcctgccccaaattcatcgacggtacacccgtcaacgcaaattgggggataacgaaggccggcaggccgagaaaacgccttggacttgcctgcttgacttgccgcgagaagaagattaagtgtaatcctaacccaaccgccgaggccgtatgtgatcaatgccggaaatctggacgggaatgcaggttcgaaagtgcgtaagtgcgatcgtaatctctgagaatatgcgtccacggacttacctcgttgaaccattgctgatccctcaaagcccgcggggtagccgtcctcccatgagaggcccatctggcagacccgactcttacgcccccaccagccacggggctttggacgtttctccgtcactttacgacatcactcgagcctcggacagtgcgacctcccttcctggaactaccggccactcaccgatgccagagagctcgatgaagacgccgtcatcccaagaagccacttatgaaacgatgaccgaggcggacagaggcttgagatcccgatcctaccaatttccatcgcccttatccggtacagatgaaactcttggacgaccatcgccacatgccgagtctgttcgttctcctgaatactctgacattctggggaaactcaaggacagcaattcggacgacccactcgcggcgtcctggaacctggacccgtacgaaagcgacccagagtccgtggctcactacactgagtgttatttctcgcacgtgaatgacggtatgtgccacatgttcccgcgtggacgattcagctcgtggttgaaaacctgccccatcaagtctgcacacgacaagatgctcctttattctatgatggctcttggatctgtgttctccgacaggccagaaaaaatggcagctatgacgcgatattctcgcatagcacgatttgctatcaatagaagccagcataccctttctttgcaactcgcccagagccatatcataatgagtctctggtactacgctacggggtcgctggtcggatcttgggactcgataggcgcagcgggaagagcggtctttggacttcgttacaatgtggaatctggcggcgttgttgtagaccacagccaagtttgtgaatacgggttacatccacaggccttgattgagtgccgaagacgaactttctggattgcctttgtgcttgatgtaagaaatcgcgcatcccccgatcaggaactcaatcctagttactgacaactactaccagcgcttctcgagcctctattccgcttcgtcgactttcatctcgtcggatgcagccctgctgaggctcccgtgccgagaagaaatatacgagactcagcagtacgcgacagtcccatatttccaatcatttctcaatcacaccgcagcctccacaggcgatgaccgctctaccctaagcccaatggcttttttaatcgagatcatggctatttggggggacatctcgctccatataacccggctaccacacatccctcttgaagcgtacaaccgacttgccgaagaattcaacaccaccatcgtccaaaaatccaaccaatggatgacccgactccccgaatacctggcattctcgcccacaaacctagaacgaagcatccatcaaaaaaatgcagacaccttcatttcaacccatttgttctaccacgtcagtttgatgaaactgtacagacacgcccgctaccagagcctccaacccgaaatccttagccaatacattcaccgcgctcggtaccatgcggtcgaaatcctccgcatctctcttaccttcgaccagtgcgccaaaaaactcacaccttctcgaaacaacacagagacatccatatccaaattaacgcccctgaaccccttcctcggctatgtgatcctatcagctgtggatgtcctcagctccgctggtctggcgtctcagttgcatgagtgcatctattatattagaggtgcgctagatgccgtccacgaactcggccgttactgggacagctcgttgcaattagtcaccgttctccacagacgcctgagtctgatgatgacttgcctgaatgagcgcagcgtcttcgctgagaaacagggctttgctcttgatggcccgccgctcgagacgaaggtccatgctggcgctttgcattcccatccgccttcgacaacgggcgatgatctttttactggttctatgcctagagaaatgattttgaatgctctgcggcttgatgagacacttatctcggagagtcgtattgcttggattagagatccatgagaggattttcccctctcggctctatttccctcctcctgttggcctcctctttggtcgggctccggaattggtgtgacggcgtgattgatctcctcgatatttttgcagtggtaagggatcttgttttctcttatcctgttacgatgtgatggatgcatttcaataatgatggtgacttcgctgattgatttgaaagtatcgttgctatgtatagatggaactgtgacctacatgacctgactttgccttttatttgtatattatagtatgtcatttaatttctgctttctttgagcgagcgctctgctactcctcatgtaccttatatcttttgggagacaggagaagcttaattgaagccaatgggataaatgaaagagtgatttactaatgtttcactattttattacaaaatcatatagaatgctatgctgctatgatactgtagttggaaactgccctgaataaataaacctgtcttcaacaagatccatcaacaccgcgtaatgagtatcttcattaacaattgggttcgagcaaagccacccaagcactgtcccaagagtaaccgacacttcagactcgggatcttccttcatatttcgtttccactccagatgaattgacggggaagagtagcatcctttaagacgttgctagcagatatcttcaatgtaccaaccgttttcgcaattatctatcaaaagagacatttccacccatctatctaagtaatatgaaccgcgagacacatgagatctacttgtatatgcaatactgatagtactcatactaattaatgtccacgggtggtcacatcactccaattgccctaagccaataggaatggagtctcgggttggcacccgagaacaaagccattgtattcaaatagtcaccgggtcgatgtttcatattctataaactcgacatttgaaaccaatatgggattatctacttgataatgagctaactaaaatagatctgcagtatatcatttcccccagtcaatgctccaccataacacctccgagcggggattccaacggagatgcggaaggtttctccggaatttcgatttccctcctcaccttgtttcattgccctatcgcatttcatccaaccaccccaaaatgaggatatatatatagatatcaaaaaaaccgagtgcgtgaaaagctctcatgtcctctttcaagcagcccgggacgcacgagttccccggcgcggagttccgcacgacggtggaagatgacggactcgacgccgactatagcatgatcggcgactacccagaggaacccgactattatgtccagctgggccttgcgcgcaatccgcccccaacagacgccgagatccgctccgcctaccgcaacttaaccctcagcttccaccccgacaagcagccgccgcatctccgccatgcggccgagagtcagttcagacatatccaggaagcgtatgagaccctcattgatccaaataagcgcattgtgtatgatatatcgggtgcagcgggcgtgcggcaggaatggggtcagcgcggagtcatggggattggtggggaggcccaacggctggatgttggtgttaaggcgatgtcgccggatcagttccggcgctggtttttgaagacgatgaaaaaacgggagcggaaagccgtcgagagtttggtttccagcaaggtatgcaatttctatattgatcttccttgggaagttgcgcgaatgtgctgttgctgacatccattgggcttggtttagggcggtattaccctgggaatcaacgcggcatctatgatttccgtcgacgaggacgacgatgtgcagttccatataccttcaccgaaagtgacatcatatggtgtttcgtatagtttcaagacgccggtgtcattaccacagctttggggcacggcagagaatgaggaagacacctcgggtgtggaaccggattcaggggaagatgtgccagacgaggaacaagagcacatgcatgtgatttggaatgcaggtgtaactggaggtttggctcgcccgatcaagaaagtcgctgttgagtaccaggatgggacagaaggagaagaaagggtatgatgtgctgcatgttcgcatctcgaaatttcgctaaacatttttcagatcgaaatgccaccgctcctggcaagtcagaatttccaatttggggccactgtgactcccaatatccaaaccctggtaggcaccaagggaatctgggccaaacatcctttctctctcctcaaggattcccaaatcagcttcaatgctcttcttctccctgccccaaccttgaaagcaagcatcgcccgggctttccagccaatccccggcaccaagccgttccaggtcagcgtgaccagtatacatacgcgctctttgggggaaacggcgccttcttttgagattcaagtctccagagaagttgccaaacagaagatcggcaccatgacatggaacagtggtgtcgttcagtggcccgaatttcttctcagccagttcccatcaatcggaatgggagctcagagtgccattgcatctgctaatgaggtcagtaacctgcagttcggtctaatctcgctccccaagcagggccaagctgcaatcgatttcgacgacgacgacgaggagagtggagaaatggacgaggatgtccgtcatctgctcaagaaaaaacgccaaatcgaccaatctgccgaggcatggcagacctatcttcaggtcactcccggcggaggcgcttttgtcttgagttattctcgaaacctcttctccgggaaacccgctgatgatccggtcaagactgaatggagctctgaagggtacttcccgatgccgagcatggaccaggcccgtgctgtgcgactcgagatctcgagtgttcttgggttagacatgactctcaattggaccattaagggtgttcgccgggttggcgagtatacgcgtgttgggctcggtattggcatcgcagacaagggtatcatgatgacagtttcatggcatcgactcggtcagaatattaatattccgattattgtttgcccggctagtgaggcaacaagcggagccgcagcgctgaccgctatattcccttggctggcctactgcgcgattgagtttggctatattcgcccacgcgatagaaaactccgtcggcaggcagctgctaaacgccaccgtgagctcaagaagttgatccctaagaaacgtgaagagagtctccaggccatcgagctcatgaccgatcaagtgcaaaggcgccaagcgcgagaggaagcacaagacggtctggtcattcagaaggcagagtatggttatataccgccagtaaacaagaaacccaaaaatgggttcgcggagcctcgggtgattgatgtcacgatccctgtggctgcgctagttaaccggggtcaactggtgattcccggaaaaaccatcaaggtaagtcaggcgatagccttgaattggtcaatcttctttagagcggacactaatttgaatggatctagttccaaattttgggattccatgaccctgcgccattgctgcccaaacgattgaagatctggtatagattccaggggcgcgatcattttgtcgaggcaggtgataaagaggacatcgcatgccccatgcgtacgcactttatatccgaatgagtataattagactcatcaaaaggtcgaagaacccctaccatgtaatttataacatccagtcgttcattagcgacttattatttcaacctccattctgatgcttttactcccctttgtgtttttactaaatagttgctccgctgctcagctgctataatgcagggttgtcataatttgaagcctttctccctataattatcctaataatatcagtctcttgtacaaataacgtgagtcgtgacctcggaaattgttgctcaacgtcggaaagtcttggcataatttgatacggcactccataaagaccagccgtgcaattcgtcccgaaaagccaaatggagcgtcaccccgtgatatcttctcatcaaccacgagtgcacagctcttgagttgcttactcttgaaatgtcgacctctatcgctgcagggcttttcaagtccctccccaaaccgaaatattctggcgaggaggaggagttgccacagcatgcgcaacctcgtggcccgcgcgtggtgggcgccgaccagattgatgaaacacaggtggtcctacgagtgagttgtggatcattctatcgacataccagtacaataactaattgattctatctttcagaggactggacccccgccctacggaaaccgtgcaggatggcgacctcgcgcccccgaagatttcggggacggcggcgcgttccccgagattctagttgcacagtatcccctcgacatgggccgaaagggaaagtcgtccaagtcaaatgcgcttgctcttcaggtcgatgccgaaggtaaggtcaagtacgacgcgattgcccgccgcggacacgccgacaaccgcaccgtccatgcctcattcaaggatttgatcccgctccgacagcgggtggatatgggggagatttccctggaaaagccatctgaggaggagatccaggctcaaatggagaggactaaggctgcgcttacaactttggtcgaaggagcttcgtcggcgcagaagccgaagaacgtcaagggcggacaacgagctgagccgacttttgttcgatacaccccggccaaccagatgggcaacaccggccgccagaatgaccgcattatgaagattgtcgagaggcagctggatcctatggaaccgcccaagtttaagcacaagaagattccccgtggcccgccctccccgccgcctcccgttatgcactcgccgcctcggaagcttactgcggaggaccaagaagcatggaagattcctccgcctgtgtcaaactggaagaaccccaagggttacaccgtgcccttggacaagcgtttggctgcagatggtcgcgggctgcaggatgtctccatcaacgacaagttcgcgcagttcgcggaggctttgttcacggcagatcgacatgcgcgtgaagaggtgcagctccgagctcagatgcagcagaagttggcagagaaggagaaggcacagaaggaggagcatcttcggatgttagcacaaaaggctcgtgaggatcgcgctggtcctagtgctcgcgtgtcacgggctcgttcccgctctcgaagtgctagccgcagcgtatctgtatactcctccaggtctgctaccccaagcgaagatgacgaagccgcccgagaccgcgcagagcagcgccgtgagcgacgacgcgaagatgaacgacagctgcgccagtctcgcatgggcacggagcgccgcattcaaaccatggcccgagaacaaaaccgtgatatctccgaaaaggtcgcgcttggtctggccaagcctacacagagctctgagtccatgtgggattcgcgtttgttcaaccggaccagtggcatgcaatctggtttcaatgaagataacccttacgacaagccgctgttcgccgcgcaggacgccatcaacagcatttatcgtccacgtgcccaagctgatgccgatgacgaagatgcaggcgaaggcgagatgagcaagcttgagaagaccaagcgattcgaggtcttgggtcgcgccaaggaaggattccgtggcgctgctgaagccgaggtaagcttctatcccatatgcatttcttttcgtcgctaataagttattctataggagcgccaaggtcccgttcaattcgagaaggacactgccgatccatttggtattgacaatatgattgccgacgtgacttcgggtcagaagcgttatggaattcaggaagctgaagatgtcgaccgcaagtcaaaacgcccgagggtcgacgacgaatgaatccgctttgtttaatctttcttccatgtgtctctatgttctctccttgtctctatgcaggcatcggaaaaatatccccaatgcattgcgggcgtttctggcagtgtaatctttaccattatcttgttcacaaagggaaatcgaatcaagcgagtcacttgggctcgcttgcatgatatgggatatgccgtctcatttacagctacaataaaaatatgttggtctacatcttggaattaccagtagtatgttgtattgctagtgaatgtgtagattgagacagctttcgcacaggtacgatgaaagatgtgggtcgagggaatgtggttggataactagctacatccacataggcaaaggagactgagggttgtattccgtgggaccgtcaatggctatggagtccgtatactcagccatgactttctcagagagctcgcacgagaactggactttgatctggtataacctgcatagacctcaacaacttggtaatgttgatatccttgtaggtaaagtaccctgtcctccgcctgcgctgtctcatggggctacggagagatggcggtcgagagggatggggaaaggagagaagaagagaagaggagaaaggtgggaggagcccttttataccccaaacccacgtgtcttcccaaactttgtggccattgtgtttgcctggctgccccaggctcctcagtagatagcactatgtcttctaggtgtacacaatacagatacgtgtatgattcttgcctctgtttcgtcgcattgataacggaccaggcacaagatggctgcgactctttaaagctttgtaccctcaaggccatgtacctcatgtaccccaggtggaattgaattcacgcaagtaatattaacattatgctggtctaaagcagcccggaggcagcgtactatattgacacagcacccactcagttcttcacctccttcttattaggagatagcacactctccaaccacttgtaagccacaggcagactatcagggtatcccatgtgcactcggttctcgaacaacctagcttccttaggaccgccatgcttgagaggctccatgcagtcttcaatcgggacaacgccgtcatccacgccctagaaacatatcagctttgttttctttctcgagacggctgaacaggaatacatacgttgagcataagcaaccggcaattatcctggtcaagaataccagtctccacaagcgagaacttcttctgagcgttcttcacaaactcctcctcgttgtcatagccatacttctccgccatagcggaagtaagcctacatcatgattagtattccaccacataaaaccaaaacccagtcagaactcacacaaacggatactcatgatcatttgccttagccaaccactcagggctaaaaacaaagtgcgatccaggtccatgagcaacagccccggcaagacgcgcacggtgtgtacaagccgcgcggatagcatagaagccacccgcactaagcccccacgccgcgacacgcgacatgtcaaactccggccgccgatccatgtaatccagcacgctggaccagagcctatcgggcgactcagggtcagcgggatctgcaggcgagtccgccgtcccgggaatctcaacgataaccgtcgcccagccacggttgatgatctcgtgggagcgctggctgttgtcaggcctatacccgtcaagcccggtcatgagcagcacgacggggacgcgattggtggggctcgcttcctccggcacccggatgtacagcgggatcgaggcgccgtcgcggcccgcgcggtgcgtgtgtgaaatcacttcctccgtgatgatgggtttccatagtgaggcggctttcaggtacacttgcttctgacggtcgaaggcggcgcgcttgacagatgtctcggggcgtgttgatgggcttacgtaggggaagcgcgagatgcggaggatgactgctgcgcggcggtacaggtctgcggcgcggtcgagatggccgttgttgagggctgtgtcggcttcattctcgagggctgttgctgttgggaggaaggcttcggtataggcgtctgtgtttgcgtcgttgatgttatcctgttgttgttagtcgtgggtttgggttgtattcaaatgtttgacgatgctcacagcgatcagcttttggaaaataggctcgaagtcttccacggatccatcgtggaatgggtagatggatttagtggcctggtcaattatccgtgttagttccctgtgtgttttctgattgttgggaagagacatacgcagaatttccactttgactcccataggaccttgatcgatccctgatgagggtagacagtgtcgaacttgtctccgaggatccaattcaccattttgagcgggatatagacgaggtagattgatgggtttcgtactgcttatggcttttcgttgatgaactgcaaatttgaggcatcttgagcttttttcattgacttgccaccaactgtattcgccggtagcagtcattaccaagcaagccaaggcagaatgatgtctatcgagatgcaaacagtaggtgtatttgccgcaagccgtagatgagaccggatcggcagagatctgatgaggttgcttcgaagacttccggatgcggggaggtgacagccaagatgacgagggtaaggaatgtagatcagatcgtactctcagatgtctcattactcaaaatcccgctgtcaatttctcttcgcggcttttcatggcatttctgtcggcttcatcattatctagccttaggtaaagtgaaatgaacttttgtactcaaatggtagaatagtttcattctgattctatggaaaacaacatagaaacatatatctaaacaagagcaacgtatgattcagatggtaattggccctgatcctatacatggcctcaaatacaaaacatatatccgacatctccaattcaatatggcaaccccacgagacatcgattagatgttggctccaccgttacaaggcaaaatttgacctgcaaataattagcaagattcccaggggtgaatttaacattccagtactaaccgttgatccattctccagcaggactggccaagaatgccacaatgcggccaatatccgcaggcacaccacagcgtccaaggggactaccattagcaagcgccgtctcaatatcctcgatagacgagttctggtcacagccaggcgcatagcgccacgcgttggtcaaccacatatcactcttgacaccagcaggagcaatcgcgttaacagtagccctcttcttgccaaagtcagcagcaaagcagcgagtaaagccctccacagcgctcttgctgcccgcatacagcgagtggccgggcacacccaggcccgcggcaatagacgacatcagcacgacacgtccgccgggctggatatagtcgtaggcattcttcgcgacgaagaactgcgcccgagtgttgaggtcgaacactgcgttgaagtcctccagtgtagtctcggacaacggcacgaacttctccgttccggcgttcgacacaacaatgtccagctgtccgaagtgggacactacctggcggaagaggttggcgatagagtcgacgtttgtcaggtcggcttggaatgcggcgccgtggacaccttgcgcttggatatcttgtaccactgcgtcggcggtctttgagctgctggcgtagttgatcgctacgcttgctcccttcttggctagctctagcgcgatgccggctccgatgcctcgaccaccgccggtcactaaggcgactttgccggcgagctcgggctgggcagcgttggggtttgcaacgaccattttggcggttattttgatgttggagggtgtggaggattgtagatgactgggtgtggaatcgtgttgagagagggaaccctaatctaatattgaacctgttagtaacaccaggatcttggctggagtcagctggatggcttggttccatcattcatacctattgcagagctgggctttgtttccgaatttgtcggtgacctattacagtgccagtcattagggcccacagccaacatcaggtcctaaaacagagtagctgtttgcgaacaaggaccttgtaccgcatgcggaagtccacgaggggctgtctccaccatctgtcacattagaatccctcggttgcattgttgtgtttccgtgcatgggaaatatgctggccagatccggggaatgttggcatcaggggaatttgtggcaagtgaataatcacacggcgcgcctcgcagctataaccacatctcgaactatctgcagaaatcaaagattgccgaacaaccatgtctcctgccgtaaagaacatcaccgctgagcccaacttggacatcagcttccagggtatgtttcaatccaccctcattcacctgcttgtgctaacagcaacagactacctcatcctctcaaagctcgtcttcgactgggcggacagctacgatgccaaggtacacttccaatcgcattaaaagtgaattcaacattaatcctgacactatcccaggactgggaccgcctgcgcagcattattgctccaactctgacggtggactacaccaagatcggtctgagaagatgggacaacatgtccgctgacgaatacatggccatgatcacccatcccggcttcctcggtgacaaaaccatcaagacccagcatctgcttggtcagacatggtgggagaagatctccgacaccgaggttattggtcaccaccagcttcgcgcggcgcaccaggtctacgaaaccgaagagttggagactgtcaagcttcgtggtcactctcatgctacgaatgagcactactatctcaagatcgatggtatctggaaatttgccgggttgaagccgaatgtgcgctttgatgagttacgctttgacgaggttttcaagggccttgactagatgtcaatgggcttttgcgaagggaaactggtacaactctatatagtataagaatttattttacttggtttccattttctgtgaaattgttgaacttatggtaactagagaaatcgcgagacttctctatgcctgaaaaacaaggcctctatttgaggattctgggtttccccactgcaatatgctatatttagccacaaggtacgacaacatcatctctccaaatctcagtccgaaatagacaaatcacagtgatcatagccatcatcgctcactgatagatacaccttcttctctgccagtctagccttctcttctgtttcaatatacccccgcacttctttgagggcacaattcaccagtgaagtcaaatcttcatcattcggatgttgccgacgaatctcttcgaaaacttcgataccgtcaggagggttgtaatcttgaggtccacgctgattaaaggcgaggacttgcaccgcattaaccgcgattgcagtggctttgagtatcttcgctctgtcattttcggtatagacgttggaagggccgaagctcatcaagagcttagcaattggatatgatgtggtcaatagcatccaaatagatatattctgatcgacagattctgtcaacttgcgtagatcatggagcaaatgcgttttgagaatatcggcttcagtggcaagggagaccttgttgagtggcatcgtatttctcgcccggtcaatcaagtcaaggacaaattggccagcaggcatattcgccaatgaagcgatattctccattccatacttagcatccgtactaaatgggctttgtgtgtggtctgtttctgcagatggctttgtgtttggttctcccgcgacgttggtcggttcattcattgctgtcgacgaggaagcgtcaccacggccatactgatcgggaaacctggtattggagctcacgcatgcttgtggagattgggttggcgattcgacacttctttcagataatttaatccgaaagtccgcgcaatgagccctacattggtaatatgacggtctttgaggataatcaggcttgaactcgtagcacattcttcagggacatactcacgtaatacccatggtgccccgagaaattcccgatcgttctcagcaaactcaccccagctggtcggtacaaagagccgggttaatctaggatacctttgagttacttggacgcaaaacgggacattgagtcctaggttgtcgtctttggtttgcggtctctttcctgattttgcccagtagatgaagattccgagtcggtaatctccatcttcgaaatccctaggtctgacattatcgcaacagaatgcatgggaagccattgttttgggtggaggagatgagagtggacccgacgagctggagagatgtgcagatcgatactggcagtttaggtaccgttgatctgttgagttgatcataatgtttcattccttgctgtatacttttagaagacccaatacacaagtttggtttaggggagaaggatccagggtacacttaaccttctgtatatcaatctctagtcactgtgtagacttcgggagtcaaaatcagcaatataattcagatgtgtcctcgcacgtgtagaggtaaaacaggcaagagcccaccttgggggtgccttcctgatcaggtgccttcccatttggtcaaaaatcgtcaccaacccaattccctcatttaccttaagccattggggaggtataaataccccctccccccccccattttctctcttcttctttctttcttcttcaacactccgggtccacattgcaaatcgcgggtcgcgtgacatgggttctgtctcccgttgatcttgatggcctcaacatccagtcatcaacatccatcatgaccttgcatcgtccttcatggttaccgtccttcatggtcactgtccttcatggtctcaacattcacagtcatcaacatccatcatgaccttgcattatctatcatgatcatcgtccacagtcatcaacatccatcatgaccttgcatcgtccttcatggttaccgtccttcatggtcactgtccttcatggtctcaacattcacagtcatcaacatccatcatgaccttgcattatctatcatgatcatcgtccacagtcatcaacatccatcatgaccttgcatcgtccttcatggttaccgtccttcatggtcactgtccttcatggtctcaacattcacagtcatcaacatccatcatgaccttgcattatctatcatgatcatcgtccacagtcatcaacatccatcatgaccttgcatcgtccttcatggttaccgtccttcatggtcactgtccttcatggtctcaacattcacagtcatcaacatccatcatgaccttgcattatctatcatgatcatcgtccacagtcatcaacatccatcatgaccttgcatcgtccttcatggttaccgtccttcatggtcactgtccttcatggtctcaacattcacagtcatcaacatccatcatgaccttgcattatctatcatgatcatcgtccacagtcatcaacatccatcatgaccttgcatcgtccttcatggttaccgtccttcatggtcactgtccttcatggtctcaacattcacagtcatcaacatccatcatgaccttgcattatctatcatggtagaaaaaaaatgggtcacctcgacaagcaagcatcaacattcataccatctcaaccacttcgacaaccatcttgacctttgactaccatcttaaccactttgacaacaactttgacaaccatccactttgactaccatcttgaccactttgacaacaaccctgacaaccatccactttgacaataaccttgacctttgactaccattttgaccactttgacaacaactttgacaaccatccactttgacaaccatccactttgacaaccatccactttnnnnnnnnnnnnnnnnnnnnnnnnnnnnnnnnnnnnnnnnnnnnnnnnnnnnnnnnnnnnnnnnnnnnnnnnnnnnnnnnnnnnnnnnnnnnnnnnnnnnnnnnnnnnnnnnnnnnnnnnnnnnnnnnnnnnnnnnnnnnnnnnnnnnnnnnnnnnnnnnnnnnnnnnnnnnnnnnnnnnnnnnnnnnnnnnnnnnnnnnnnnnnnnnnnnnnnnnnnnnnnnnnnnnnnnnnnnnnnnnnnnnnnnnnnnnnnnnnnnnnnnnnnnnnnnnnnnnnnnnnnnnnnnnnnnnnnnnnnnnnnnnnnnnnnnnnnnnnnnnnnnnnnnnnnnnnnnnnnnnnnnnnnnnnnnnnnnnnnnnnnnnnnnnnnnnnnnnnnnnnnnnnnnnnnnnnnnnnnnnnnnnnnnnnnnnnnnnnnnnnnnnnnnnnnnnnnnnnnnnnnnnnnnnnnnnnnnnnnnnnnnnnnagccaccatccaccatgggcctctcctacaagaaccgtgaccatcatttcgtcatattacagagacacaaaggtttccacggctttccaatcaactcttctctcttttttgtcagcatcaagtcccacggccaacctgcaaagaaggcctgccttgaggaacttcaacttctcggtcaaaccaatatccactacagaccaacccatacaagccagtaactcgtgaaagcttccggatcaagtagtatccactgactaagtcactttcaccaacaaacacgggttgacatccacaaatcagaggttttttatgtctcatatcatcgtccaaagtggttctgtctgtacgaaccaacgtttttatgtcattggaaattagttagaagaagaatcaatttttgctatttcattttattctttctgtagattaatattcactttgtcctaaaccaaatacaaaaggcaagataaaaaggctaagcctctagggatgttgatacaagggtttgtctattgtcttctatgcctatggggctacgaggcctattattttcattttctacaggaacgatactctgtgtgaccatattttgaatattcattccatgacaagtttatccttctctgtctccaacagataacacagattcccatatagcaaaaacatcaactgagaccagacattcaataatcacaacctccacaatctccacaatcttagtcaaacaacaagtaatcgtacccttcatcgcagtcatagttgccatagtcataagaagacagcccagaataataacaaccatggtcctcaatatgcaagtagctctgactcccactgtcttcatcatgggaagtatttcgagtctcaagtcgaagcgaagatgacacaggctggtctttgtcgctgttttggttgatatcttcagtcccatcatcaggagccaccccaggatcttggtcttggtcttctccatcacaatcacaatcagaatccatagacccagtctcaacaataattgaagacggcacatgcttgtcggaaccctcagatccccaactatatcctaaatcaaatccccactcagagtcgtatccatgatccgagctagcttgttgttcgaaaccagattccagcacaggctttggtcttgatgccgaccccggcctcgttccagatccagatgcagatccaggcattttctgcttggctgcattctcaaggtgcttgagcggtttcgctacactatctctccaacgacgcgagctccccgtgctcggttcgtatatattaagatcatagactcgacgatgctcgtggcatcggaggatcttgcgtctgtttcataattaatataaggatatgatatgataaaggggacgctaatggttcaaggattagtcaactcactcgtgaatcttttcgaaattcgcatctgcaatgtcgtatgtggatacttcttcgaaattcccgtctgtatcgcttgggacgaagtactggatggactctatcggtcctcttttggcacgttgtatgagctgcatgcagacgcttgattcggagggatcgatggatcctattgaagtttcgggtgtgctcagggcccattttgtgaattctgtgaaggtttgttcgtgctctgggtttgggagcttttttggttggatggcgctgcagcagaatagatggtttgacattttgacggtttggtttgaatgagtttttatatagatgatggttggtaggagagaggatttatttcgtgggggactctgactataggctgtgtgaagtcgtcaggatgtgctaattccctagtattgctagattaggaaacggagctgttattcccatgtctagacttgcgggtattatcgggatggaaagtactatgccactttcatattttagttttggatatccatggtagaaagtaggaagttggagaggcatgtgaaggtcattcgtataccgaccaaatggctggcattagattaattagtagaaaagaaaatctgatatacaagcattaataacctctaaaaagacgcaatatcatatcacaggtgctggcatcactcccaatccttgatctcagccaggatatcatcatcactgaaaagagttagttgatgagcacatttcggcctttagagtgtactcactcagagtctttgatgggagagctgtgaccgttattaataacatagccgctataggtattctggtttggccacgggcccttggtcgactcctcgtggatagtgatgtggtggtcgtgcggtttgtcggggtgctcgacgtagacatcagtgtgagggactttccagtaaccatctgtgttggcactgggagatggcttcggcaccgatgcttgggacgatccctgaggttgattcgcctcagcgggagcatttgtgcccttggtggcagtatacagagcgccgtgattggtggtgggaggtgtggtgtcaagcccagtcagatcaagaccatttttaccagcagcatttccgctgacgccttgagggtaggcagcgcaggtgtcgtaatggctctgcgggggagcgtgcaagctgtgctggaaggtctcgggggcctcgatgatagtggccatgagaccagtctcgacgtgccactcgacgtggcagtggagcatccagacacctgggttatcggcgcggaagcggatgacggtgtggccgttgttctggaccatgatggtgtcgcgtctgatcggggtgttggagacgttgctcgatagacccgtgtagaagccgccatcaactggggtacgctgcagaacctggaattggtgaccgtgcaagtgccatgggtgcaggttgttgtggtggttgttgatgatgatttcgacgacctcgttgtacttcacgacgaaggggtttacttggccgtatacatcgggattggaggaaaactcgggaccgacggtgttggcagtgtagagcgatggcaccttcggggcgatgtacgtcttgccgttgacagtgaagcgcggaacaccgtctaccagaccggcggcggtatccaaaatgatctggtggtccacgggctgcaggatgggctcatggtcggcaggtaccaataggacatcatccacaaagtccgttgcggcgtcaatgttattgaagacaggaggcggaggtaggggcttggcatcgtcgtacaccaaccaggcggtagcattggggttgtaattctccgggatggtacgattttcgaagatgaacatcatgttgacatccatggtatcccaaatagcaaagttctgactggcatcaggtttggttttaatcaagacactcattcgctgaccagtcgcaacgcgcaggaacttgtctccagcagggtagggctcggtatagacgccgtcgacctccacgacagtcatctcatggccatcgaacacccagaagtggccgggccagtttccaacgcagatgatgtgaaccagatacgtcttgttgggcaaaaccttgatcttggtgttggttgagtcgttgatcaatgccgcgtcagggaggggctcttggccatgggaggccgcagtgatcgtaccgagcagctccggcatctccttgtggtaccagtcgctcagagtgagtgtgaattcatcgtcatagtggaaaggagggctagggtcgtggacaatcagagcaccacggaatccatcggggtactggcccgcgttgtgtgagtggtaccagtatgttccagtttggttgacctgtcctgcagttagcatatgttcatcttttccaccgggattacccacatcaaagtgatattgcatgtgtgcgccgggggcaattgggcactgagtgactccaacggcgccatccataactccactgccatgctggcgcatgccgtgccagtggatagccgtggactcgtttccgagacggttgtagacatcgacgatcagttggtcacccaagttcacatcgatctgcgggcagggccattggccattgataccaatgaccgggcgctcaaacccatccggggcagcattcacccaagtaatgtcccatttcaggtaaacgtccttggcggcggctagaccagcccaggtggccagcgcaaacaaactaaacttggccattatggcagtattgaacgagcgaaagacgattggcctgattcaggaggatcgtaaaacccgccaaaagagtgcagtcgaggccgaatcaagaaagcaaaaacgaatgtcgaagaacgcggttgtcgaatgggcgcaagtcggccgctgtgctggatgtcgaccggaagagactggaaatggggcctctttaatcatggcgatagaataacaaagtggtcctgtcgatctgcaggggcctgagtatgctgctgaaatcagatctcatttcgacgttcgcgggggtgtcatgtcattggccgtgccttcattcacgacttgaaggctgggataataaacacgtagtagagcagtatcaggctggaccctgagcttccatttttttcctgttgaagaatgcccttagggggttgggagggtggaatgtagatagttcaccgaaccggaagacggtttctaaccgccacgcaaggggggcatactcgagtcgcactcgtactcgactcaaggcttcgtttagagtaagcatggcacgaaccggaagttctaataatgtatagaacttgcacagcatggattgacacctttgtgacttgacaggtttaatattgtggagtatcatgatgaagaagaatagtcgccgcaaacggattatctatctagttgtagtctcttagtagtctcttatatgttttctctgtagaaatcttctccttcttcacctgtaagctctttctctaaggaaactgcggcaaagggcggaatatgcttgatacggcctttctatgtacaacctttgacgaatcgacgatataagcattagcgagtcatataaaccccgagaataaagataactgggggtttcttattaaattgtaatatacctcacatatagactttcgctggttgatttaagttgaaaataaccttaagtccaacattatcctcagcacaacttaagcaaatcgaatataaagcatccaagtagacgtcaagcaaaaggcgtatgaactcctgacgcgataaggcggaggttcccaatcgggctgtgtgacgttgcagtgaaatctcttctgttagagcggcaaagaaaaaaaaaggtctatggcttcagcgcatttgctatcgtgtatccccggaaaagcgggagattgactggagatgttaccctagacaaatcagatccctgtctggagtcctgcatcccatacatgatcccagaagatctacatcgtattgtctgataggagaacagccgggaaacatcggcgtagaaggccaaggcccacaaaaaacgcccaggcacgagagcgtctccctaattgagaacagtctgataagctgtggagtaaaacgaagagatttagtgttagtcaagcgctggcgataacgtgggaaaaagtgggagggggagaagttgaagaggaggaggggttgccactatcttcacttcttttttcttcagagtctgagtcaaagagaccgtcggccgatctacagtcccaaatcttattctcaatcttgactgccactgacgacatatctggatggcgcttgctcaccccagatagcatcatcgagcctcaatggcgtaatagctggttctttattcaaacatctcttgcttcacaataccctgacctcgtgatatggatcaatcaatcaccctcatcgatgcacaagtgcacttcctagtgagtcattcatattcggcatacaacatctactaacctaatgctaggaggaatgtgtggtgctggtgcacatcccattggagctgtatccttacttcttaaagtctgttctaggactcattttcgatgaagtccctccactggaagacgagacagaccatgcatttgattatgaaaatgcttctgaggatggctcgtacaaaccacctgcattcatgaacgtgtccatcacgccagtggaagtctccgtcatgtgtccaagacgcctgctcgacaaatactttgtccccgtcatggaccaactcgaccagttggatgggtcgctccggtcctgtctaatcgtgagcgagaatgactatatccccatgcaagtgctcggcgaaggcctcgaggccggaaaacgagtcttggaactgaccagtccacttgccctggccggcatgtatgtgaagcctaatatatccatcccctatataaaaaacacccatactaacctccccagatccatcttcttcatctcaacctacttctccgactacatcgtagtcccccagcaaagcaaagcaagcgtgatgtccgctctagagaaaagaggcttccaattcaacgacgcctccgcagccttcatcaccaacccgctcagtcctaccatcgaaagaagactcagcgacctcatcccaccgggcacacccccaccctcaactctaggcgagctccaaacccgcaccttcaacaatctccgcaaacaccaaatcaccccctccgtagacaactccctgcgcctagtccagtgcgccgcccaccacgaataccacagccaagaatcctccatgtccatcctgcgcgacgccctcaccactgtcctcctcgtcgacgaaccccgcttcctctccctaaccctcgcagccctcgaccccgccgcctccctcctcctcgaaaagcgcctcctcccccgcttcgcccgccactccacctccgaaactggattccgcgactacgaagacggctccggcctcctcctcgggtccaaggaagaccacctcatccccatcaccctagacctccgcgacctgcccctcgaagcctcaggtatcgtctgcggcgtggcgggtcgtctcgcagacgcagctaccgtgaatccaagcgccgtcggcggcctcggctccgcgaggacgttcgattcggtcggtactcggctcgcgaacgtctcgctcgataaatcatcccatgcgctccagcccttgccatcctcgacgcaccatctccagcctgatgtggatgtcgccgatgcggtcgagattagtttcttgagtaccgcgcgcgctggtaccattattgttggcgaggatgagcttaggagggcgattgatgcgctcgaggaggagaagatgcagtcgcctaggcttgatggtctttgcttggagtctgagactccgccggatagtccgcagcagggttgagattgcgctttgtggatggcagaggatatgacttatgtgttcatgtgttgatgtggtgtatgggtagtaaaagttcgcttgttttaatatttgtatgaatagctctacttggtcatggattgcttgagtttattggtctgatgtttacttacgtcggtttgagatgaaattgttgtaaaatggtagtcatgtctgacgatatatatctccagagtagcaccatcatatgttcaacccaacagcacagcttaagataaaacgatctcaaattacagaaatagcagaaattgagattattatcttattatttcatatctcattattaatataatagcgctggacagacatacaggtcaaatttctccaacatctctctactatcctcgctgcaggcgaagacttggaccaacgtagtaaatgtctggtggtctgcagatgtacttctaccgatcttcgctctggccttgctcaaaatagccgcatcgcctggattgcaattgagaggtgctcatcaccaagcccattgaagcctcaaattgaacgaaaatggtagagggtagtaaggccgacacagacctgctagtccatatcggattccaccctatcgtcgtttcggcagtggcataatgcggcgcgtacgcggttcgtgatattaacgtcaacatgaggatgactccgagacctgtctgagacaagttcatccgtagaccctgacagtacctaaaccaacagtcagcaagtatcccaacccgccaaacaacacaatccttatcctcaccatcagaacatccagcagcccaatcccctacaccctcattccacgccacacaactaacagccttaaccttctccccaaccggcacagcagcaataacctcccccttaacaacatcccaagcaaacgccgccgcccccgcaaccccctcctcactcccactcagcacgaccgcatcccccatcgcgaaaaccgagcgcacgcgcagctccgcattccgatacgaataccgcggcttcccaatcccaccgaccaccgccttctcgcccccaaacgcattgagcaacttcccatccatgcggtccagcaagcggatatacccgtccagcgtcgacgccagcagcgcgttcccgtcgctcgagcagcgcacgcttgtcaccgggtgcgcgaggacgtcgacggttgtctttcccgtgcggacgtcgtagatccgtgcgtgtccgtcgtagctgccgcttgctattgagtagctcggcatgtgtacgtgtagtgtggagaccgtgtcgctggcttccgtgagcgtttggatgggtttgtagcttgtggaccgggtatcccagaggttgattgttgtgtctgcgctacctggagggagggaggacgttaggttaggatgctaggtgggaagggaagggaagagtgtggggataaggggactcttaccggttactacgacggagtccccatcgccgccaaattgcacggcttcgactcggctgttgtggccgctccagcgtttcgtcgtgatgccttgctctacatcccagaggaagacttggcgatcgcctcctacgctggcgaagcgcgcgttgtcggctgtgacggcgatgtcgaggacggagtagccatgtgcttcgtatttttggattggagtcgtcgtctcgactacggtcgggctattggtattgtttggaacggcgcgcgaaaggtgtactgctcggtctgaggagcctgtgaggacatatgtgccgccggagtttgagaatgttaccgcgttgacggggcctagatgaatgtcagtgtttgtgctttggaggtgatttggttgtaataacccctagacaataagactttaccattgtgtgttttaagagtgtggatatgcctagttgggaatattgtccggggcatggccgttgagttggtggagagaaggaattggagttcaaagaatgcgggagttcagagcttcaactttcaagtctacttaaagagtcctatcggaggggaaaaaactactactttacttcgaacgagctcacaagtattaattctgtcatacggaatacagaagaagttattatcaaagttgtagacacaccatcgctagctaccagcggtaaatggatataacaaacgaaacgaaccaagccaaagaaaggtgcttccaagcgcgaacggcaagacatagggtactcaaaagagaagaaaaaacaagagcatggttcgactactccccttttgaacgatccgggtggaatcccggtaaaattgcaacatcttaacgacgtccgtggctgcgggtgccggaaccctgcaaaccctcgatctcctgctccagggatttgatactggaataagtcagcaatgaattccaccaaacaacgctccggaacatacgctgcatgagtagcctccagatccttgttgaggcggtcgcgctctgagatgagcttctgctcccactggcggaaacgctgctcctcgaccttgacctgctcggtgaagcgcttgcgcagagtctcctcttcctccttgaacttggggttgtcgagcttgcgtggccgggcctcgccaaacttgcgggtctccatctgctgggcgcggtatgcctcgtagtgcgattcttccgttgtgtgaataaggtcgagcatgtgggtgcggatcaagatcgagcggagcttcttgaaatcgcagtgctcctcattctccacctcggcaacaccccaagcgtactgacgacccttgacgacacgaccatcgttggccttgacatccttctcggaaccgatgacggcgaaaggcatggcagccatcaggctgcgggcatgggaagcggcgtgctcgtcgtcctcctccacgggcggggtgtaaatcttgatgccctgggcctcaatcacagcgcggatctaatcaaaggttagtccggattctccccctcgtgcactcgttccactcactctatccttgtagcgcaccagatccgcatggctcagggtatcggccttggcaacgacagggatcaggttgacgcgggagctcagacgtttcatcacctcgatatcgaggggcttcaaggtgtgtccagtggggcggatgaagtacaagcaggcgtgaacacgcatgtcaatcttgtcggttcggcggggctgctgctcctggagcatgtacgactcgtgctggtcatccaggaactcgataatgggttgccatgaatcacggttgttcacgtagtctccgaatccaggggtatcaatgacggtgaggcggactagaaaaggacacctcgtcagctatcgaaacgcggaagtcgtagccctccaacacgagtatctgggtcgcacctttgaagaacttctcctcaagctcagccttggtaatctcaatctccacggttcggtcgacctgcttctggtggcggcgcttgtgatcggcatagttcttaatggtggtggagaagagggtgttgatgaaggttgtctttcccaatcctgactctccggcaacctgatcgaagcttagcatcaacacgggcggatcatttccctccgacggtgggacacaccataatagtgaaggctgcaccccgcttcgcgacaatcttgtgactatacaagcttgattagaacctttcctcgtatccactgtaatcactctcaggtacacaccgctggttggggagctatatcaaagagggcaagttagcttcagcatatcacaagggagacgcgggcgttctgaatagcttacgttggcaatgccaatcggcgtggcggtctctgaggtcgacatggtgggttatagggggattaaaaacaattcggaatcaacacaaaggaagatgaagaagaaggccctggtgtagagtaagacccaaattgagaagagaaaataagtcgactcctgaggagaaaaaaagggagaaggaggaacgaatgtgaaatcggatctctctcgaactgcccgtcgctgcttccccctgaatctcctttcgttttctggagtatacctcaccttgcctatctgggtttagcttgacggactagtaccgattgggtccgggtccgggtcattgatgatccgcgggcccttatcacggtagctggttgaattatctctaattttttgatctgtgagatcgccgacagccaaaatgaagacagacttcaaggtaggtactacgcttggattcttgatcgcatgcaattgccagcaagcctggattattaagatttatactaataccctcaattttagttctccaaccttttggggacggtatatcgcaaaggaaatcttctctttactcccgatggcacatgcttgctttcgccagtaggcaatcgagtctcggtcttcgatctggtacagtatgtgtcgcccgacagtccttcattcggtgatttgaaaccagcccgctcacaattgcttctatagaaatacttcctataccttgcctttttcgcaccgtaccaacatcgaccgtctcgatcttacgcccaagggtaatcttctgttgaccgtggatgaaaatggtcgcgcaattttgaccaacttccaccggcgcatcgccattcaccacttttccttcaaaggacgagtgtccgcactcaagttctccccgtccggtcgacatttcgccgttggcgtgggcagacgcctgcagatctggcagacgccctccaccccgggtaccgaaaccaatggcgagattgaatttgccccgttcgttctacaccgggatcttgctgcccactttgacaacatcgaaagtgtcgaatggtccagcgattcgcgcttcttgctcactgccgccaaggatttgacggcgcgagtatggagcatggatccggaggaaggtttcgagccgactactttggcgggacacagacagggtgtagtggctgcctatttcaatgcgacacaagaagtggtaggtgcttactggaaattggactggaatacatactgattcttatagatctacactgtcagccaagatggcgcactcttccgctgggagtatgtttcaaaaaaagacgaggaaacgaatgaagacatttccgacgcccgatggaggatcgtcaaaaaagatttcttcatgcagaacgacgctaaggtcaactgtgctgcgttccatgcgccgaccaaccttctggtggtagggttctccaatggtttattcgggctctatgaccttccagagttcaacatgatccatcaattgaggtacatcagtctgtgacaccctccctttcacagtggctaatatatcccctctagtgtctcccagagcaatatcgatgttgtgacaattaacaaatcaggcgaatggctagcattcggatcgtctaagcacggtcaattgctggtgtgggaatggcagtccgagtcatatatcctcaaacaacaagggcaccttgattctatgaacgccctcgcatattcaccggacggtcagaggattgtcacggctgccgatgacggtaaaatcaaagtttgggatgtcaagtcaggcttctgtattgttacctttacagaacataccagtggagtgaccgcatgtcagtttgcgaagaagggaagtgtgttgttcacagcgtctttggacggctctatccgtgcatgggatcttattcgctaccgtaacttccgaaccttcacagcaccatcccgactgtcgttctcctcgttggccgtggaccctagtggagaggtgatctgtgctggttcaccagactccttcgacattcacgtatggtccgtgcagaccggtcaattacttgaccagctctccggccacgagggtccggtttccagtcttgcctttgctgccgatggtaaccaccttgtcagtggaagttgggaccatacagttcgcatttggagcatcttcgggcggtcacagaccagtgaacctctgcagctcatgtcagacattctcagtgtggctttccgcccagatgggcaacaagtcgccgcatctaccctagacggtcagctttcattctggtctgttgaagatgctgtacagcaaggaggagttgacggtcgccatgacgtctctggaggacgccgagtggccgaccgccgtactgctgccaatgccgcaggcaccaaatccttcaaccgaatcacgtacagcgcagacggtagctgcattctggccggtggcaacagcaagtacatctgcttgtatgatgtcggaacggggtccttgatcaagaagttcaccgtttccgtcaacacctctatcgatggcacccaggagttcctaagcagtcgtgacatgactgaagctggtccccgtgcgcttattgacgagactggcgaagcgtctgatcacgacgatcgtgttgataccactcttcctggcgcgagacgcggtgatgctggtgcgcgcaccacacgcccagaagtccgcgtgacgtctgtggatttcgcaccgactggacgagcattctgcgccgcctctaccgaaggactccttgtttacagtttggatactgacttcatctttgatccctatgatctggacatcacaatcacaccgtcaagcatccttgccacactagatgctgccaaggaagctgccatatccaatactgtggatgaggaaaataccttcctcaaagctcttatcatggccttccgattgaatgaacaaaagctactccgtgtcgtatatgaagcgatccctccgtcagatattccccatgtggttcgctccgtgccctccgtctatttacctcgccttctccgatttgtagcacatgccgccgaagaaactcctcatcttgagttcaacctcatgtggattgagtctttgttcagcagccatggtcgctatttcaaggataacacaggcacattcgcaaccgagcttcgtgccgtccagcgtgctgtcgatgacattcgcgagaatctaaaacggttgacggaaaagaacctttacgatctcaactacctgctctcgaagcctgttctggggaacaagaaaactagcagtgctttgttggccatggagaccgaggatgctgaggttcctgatgatcagatggtcgatgctgacgagggagaaggtgactgggttggctttgaatgatttctatggggttttcttcgtgtatgtctacttgcatctgagccaggcgttttgtatattggttgcaaagaccaaaaaaggaaatagacagaggtctttgcggccttgtgtgaataatatcctccaagttctgctctctgagacctcaaacggaccctttgtccatctgttcgccttgagcaaacgccgtcccgttttaaaataaaaagtcttaccttctaatactatccgaatgtgtcctgtgccaccctgtctttacccttcttactcttcttaccgccgaacaccttccttaatctctccgcttccaatattccggacaatccaagtctccggagaatcatttatctaagtacctttcctctttctgctgtcaagagcaagatctcatcgtcagccaacctcgatatggccggcctacccttctggcccctcattggggtgttggctgtagtgctctatctccttcgacgaccaccaccttccagtttgagacatatcccaacggtcaagtacaatgcctatctaccatatttcatcaatcgactcatgtactaccccaaagctgcctcgatgatcagtgaaggatatgaaaaggtacgcagcatactgcaaaccacgcgttcacctctattgacatttctgcaatttctagtacaaggatagtccatttcgcctgctcactggcgatggagaagtcatcgtcctgcccgtgaaataccaggatgaactgagacatcttcctccttcgagactcagttctctacatgcccaatatgaagtaccatgagcttattcgtaccacattacgttgagatgctgaagctaatataatattcacagaacgcgttgggccagtacaccaacatcatcatcgacacccttctaccttctatgaccgtgcggaaaaagttgacgcccagtcttggtaccaacatcatttagttctcttattttcagcctcgtgctagagacctaatatatcgaataggtcgcgttgttcccgggatcatcgacgagctgcgaacagcattcgaaactgctctcccaggatgcgaaggtgggaccgaccaaccatgcagatcaacactcggatactgacagagaggtactgaacacagatacctggattcaaattaacccaaacgagatgttcacccgactaatcgccctcgcgacatcccgcatgatggccggcgacgccctccgcgaaaacgaagaatggctcaacgtcgcaagcaactacgccgtgaacgtgggaatcaccattctcctgctccgccctgtccccaaatacctccgtcccatcgtagcgcgcttcctccccagtgtccgtaagatgaggaagcagttgcgcttcgcgaaagacctcttcattccgatgatccacgagcgcagactggcacaacaggctaaagaccccaattataccaagccggatgacttcttgcagtggatgatggatctgagcgaggaaaagaaggaggacctcaaaccggataccctggcgcatcacatgctgctcttggtcacactggctgttactcacaccagcacgatggccttgtgccactgtctcttcgatttggttaccagacctgaatacattgagccactgcgggaagaaatcacacggactctgcctgatggctggtatcggacgactcaggctgcgcttaaggagcagtcccgtctggacagcttcttgcgcgaatctcaacgcttcgctccgcctggtgaatgtgagtatcggatcttttcttatggctgcgccgtataaccagtcagggttagtgtgttagtatcatgctctaatcacctacgttgtctagtgaacttccaccgcatcgtcaaagaaccaatcacgctccatgatggcctcgttcttccagtagagacacacgtctgtttcgctgccggtccgattagcaaagacgctgtcttcgtcaaagacccaatcaccttcgacggctttcgctggtgccattaccctcgggatcgctttgtcctgacccctgagctcggaaaactcgacgctatgctgaacggtgctggtgagatgcaggctgaaaagtccgcatcttccgcctatttcgtttcgatcactaacaccaacatgcatttcggcttcgggctccaggcatgtcccggtcggttcttcgcatcgaatactttgaaggcaatcctgagtcgcctcatccttgactatgaattcaaattcgttgaagacctgcaggggaagagaccccgtaatcttgtggttggggagcatattcttccgagtatgactacggagatgctgttccggaaaagacctattgggctttgagtagaaggggagatgttacttttcagggctaccagaggtcgatgcccgatgccatacttattctaccaagatgttgcggttcttgctttacatctaaatatctcagactaggaaataagaatattgagtttgatttcagttccatcgtacagtcatctgcaatagatataagcactgccacgacatacatgtcgagacggggcgcagatatctaaagcgtccacatacatagagggttcgaatccaatcgtttcatcatatcttctctcgaatatcacgtcgatcattccctaggcagtgggctggggggcacctcctcgcccacgacctcctctgccacggaacccattaccacgaccgcggccacggccacgtcctcggtccaatccttgcggcggcggaacgcgagagtagttctgcggacggaagttggggttgttttggataataccctcgctgggatcgctgttgtccattgcgacatatccgcctcgcgcacctccccgaccggcacgggggccacggggaataccgccaccattgggacggaaaggaagagtggtctgttggccgttgttgagacccccgcgacctccacgtccagctccattgccttgtccattgccttgtccggcgacagctcctcggaaagagcctctcaggggcggaggggcagttgcgttcctcagttgtccctgtccgtgaggaccgatgggtgcgccgtatccggcaactgtcaaaggagtctgggtttgctgggtttgctggctagctgtggcacgggaactagtgatcagttgtcggttggagatgttgaggagggaagatgctaaaacagtttgaccacggaatggtgagcatcgaccacctagcgtagtgccgctcatgaacgacacatcaaagacaacatcaagcagaagtgctcgtggggttctggttaaaccgacaacagtgccacgagtagcgattggcaccttaccagaatcttgggcatacacaacccgatcaccaagctggaaggtttggtttccgaggcggtgctcgacatcggcaggccgaaggagtgcactacggggcacaccccgaaccttcttcggttgcatatctggctgggacgcattgagattatcggcatcctgctcaatcaacatcacaatatccgagtcaagttgctcagcatcgaggggcactctctcgaagttcttagcttcaatagatttgagccaatccttaatctctttcatcttaagggcggcgatttcctctggatagaaatcagtcggagaataacggtcgctttgagggttgcgctggattccagcgatgaattcggggaatttaatcatgtactgttgaagcagttccactgccttttggctaaattcccagccagattgtcctcgacgggagtatccaagaaccttctgttgctttgcctggaacttcaggttaagaccgaggttcgcacgttggccttcgatatcaactgtaaaggaagatgtgatcttggctaggaccaaaggattgaggcgaagactgcgcgcaacagcgtacgaaggcatgtaggggcagagttgctcagatgccctaacacgctctcgaccgaattctggctcccgacccttcacagccgcgaccaatccattcacctttccgtcttcgtgtcccccaacataaacaggtcttccatagttgaaatcacccaagaagaaggcacgagaaccctctgggaattcttcttggatagagagagcttcacgctcaataaaacgttgatcaggattgatcacatcatcaacaacaacctgtagagcataatccgtctcttggccgggaatatcagcgaattccttgattgtggctccatcgtctgtcttgctcatgcccttcagaagttgaatgtggaccagagattcgacatcgccaatgataattgctagacgcttgctgtaggtgccctcaatcttgttggccttcctcttccactgctcaatttgctgaggggtatgaggaatagataaagggtgttgttctccaggaggtagaacataatcaaataattcatccgaaacgcggaccacaagagcttcttgtaagaatggataacccacgtgaatacgcttcccaagcttcgtcttagccagttcaatgctcgaccggcttcccggatcaaggagtgtaataacctggctctcgttgcggctatcttgattgaacacgcaaacgccatggaaacctaattgaccatggtgcggaagtgtcttgatgctagggaagccagcaagcgctgccttgcctaagtggacgccgtccattaagccagcgtagggcaccaatccatccatgacggggaggtcaaagaggttctcaatacaacggcagctaggaagatccgggaatacgccaggcattgaggaggggtaaatgaagttcacttctggggaataggtgaatttgagacaaaccccaaagtcgttccttgctttttcatccgcggaaagtaggttttctttcgttttgagggcgtccaaaagccgtttttcgtcgatgaatggaatcttgacaacggcttcccattccatcttttttccgttcatatccagatcaaaatcacgggggtagaaatcgtagatgggggaatcagccgaggtcatcaggtcccaatacgcagtaggcacgatcttcttgctgcgatcgggcaagacacccataagctggtcgaacggccggaaaggctgtcccaatttgaagtccatgtctgcaccaagaccatcattcacatctgttcaaccgttagcaatcagaataatccaacaagaaaaaagggggattgggtactactaaccagaaatcataggggcatagtggtactggaagaaccaaggccaagaagcaatgccacggtaatagtagaacaagacccactgcaatccttgcacgtagttttgcgccaacttcttcatctcttctttgttatcgaggccccagccgaacttggtccgataataattatctttccactctaaaaacttggcatcatgtttctcctgcgcggacttctgtgcttcctcggaagtcatctcttgaactttggccttctcgtacttccgaataatacgctgaacagccaccgatgcctcttcgtcctcttcgtcatcactgtcacactgggttggaggcaatgtgagtctcatgaatcgatcaccgttctcgttgtcgatggaggaccaaggcaaccggagctcatccgcaagctgttcgacgaaagcgcggtcacgagctggaagtgtaggagggaggtcaaggggttcacaggtcttatcagaccggttcagaacgtacttcttgaccgtcttaagtatctccttctgagcaggagtgagcgtaagctctttcttctgttgcgaggtcgaataatcaatgcttgggtctttcttcgatttgatccattgggcatcggagttttcagcctcaaagaatcggtattccacggcactaagcgcagtcacaagcatgcccaaccgttgcacgttaataacaccctgctcgttgatgtagccgcccatttttggcagcacctccttgtagagcttgaacataagggcaagggcaccctcgttgatatgtaagtttggcaggttgggcaagaaatcgttgccgacgaaaaaggccataagaatgaaatcatcaatgacacgctccatatcgaatgggaaatccagaacaccatcttgttctagctcttggaattctagttccaaatactcccgcaccacgctcagatgcaggaggtaaaagttttggtgttccaattctttgggcttcttggatacttggcgaccaaaggtcacttcctctcgaagaagacagaagtgagggtcatggctgaggagacccagcatgatcagatcggcatccagaccgtaaagacaatggcgaacgttggattcatagtcgggctgcgctttcgagcagcgaatgtattccataatcttgtgctcgccttctccgggaacctcatggccagaaagcacaatttccacaccttgccaatctgtgtcctccgagattttcttgttgatgaagtatttgagttgtttcgtcaatttctgcatgaactcggtacccggggtgatgcagttgctgtcaaaggcatcttcctttggcatctccaggccctgctggatagccttctccttcgcattctctgcatccagggccgtccggaatcgacgcgcacgttgttgattcatcttagcgcgaggcgcaacaccgtctaccgccatgtagaacagtttcttgggcttgattttgccaaatagatgttcaatgtaattgaagatggcaatgaacatttgatcctccgtcatgcgaaacgtcggggagtcgctgtcactatgtgtacagttgtgaataataccgttcatgtcgaggtataggctatcgaattcgggtatccggctctctgcgatcagcatcgagattgacggataccgctcactcagccaacggaagaatttcgggacacccatggtgaagattgggtccgattgaagcgaaggtcgccaataaagaaatcggcaggtgatgtatcgtaatagtttaaagatcgtatgaggggttcttggaaaggactgaagtagagttacttgcgacgaaaggtgaaatcatccaatgaacagatcttggatgaggtactgcgtcaacgaagtggtgtccaaagaagaatataaaaggacaaacgtaaacaagcaagagaaaaaatatataacgccggactgacgcttttcggttgtctatgatgcgatgcgagacgtagtccccgcggcgatgcgatgtgaacattgaagagtcaaccccaagctcattcaccgcctaccaatcaggtttagtgccattacgggtctctcagcactcattaacgcgcgaatgcgcgtagctttcctccgcctacctatctgcttcacacactctttctaagtggctgaagttctgttatcttgtgatcttattatattgcttgatcctataccaccccaaagccatggatccctatgaagacgatgctggtgagcatccatgaccttgcgcactactcaaaaatctcattctaatgaagacctaggtgctggtgacgagcacgagaaagaccaggatcaggaccaggaccatgaacacaatgatgagaaggcgatcaatgaaggtagctttgctcaatctctccagttctgccaaccacggtatctaattatattcattggtcacagagtacaaaacatggaaaaagaatgcgcccttcctctatgatatgatcctgagcacagcattagaatggccaactcttacaacccagtggcttccagataagcaagagtatgccccgaaaccctactagtcccactggtccaatcatcaacctaaccacggctatcttcagagtcccggacaagccctactcaacccaccgtctcatcattggcacacataccactggtgaagcgcagaattaccttcagatcgctcaagtgcaactcccaaatcctaatgcgccaaaccccgaagactatgatgaagaaaagggagagattggaggttatggtgggggctcaaagaaggcacagatggagatcaagttcaatattgtgcaaaagatcgatcacaagggcgaggtcaacaaggcccggtatcagccacagaacccaaacatcattgcgacaatgtgcacggatggtcgggtgatgatctgggatcgttctaagcaccctagcttgccaactggcacagtgaaccctcaaatggagctcctaggccatgaagctgaaggcttcgggcttagctggaaccctcatgtagccggtcacctcgcgacaggcagtgaggataagactgttcgactttggtagggcacagcatgaaaacccaagaatttggtgtgactcgcagctaatgaaggtcaccacagggatattactacatacaccaagggcaacaaggcagttcggcccagccggactttcacacaccactcctcgatcgtcaacgacgttcaataccatcctctccactcctctctcatcggaaccgtctccgatgatatcacgcttcaaatcctcgatacccgccaagaagactccactcgcgcggctgcttccgcggaaggccagcaccgcgatgccatcaactccatttccttcaacccggcttccgagacgattctggccacgggttccgccgacaagactatcggtatttgggatctccgtaacctgaaatcaaagctccactcgctcgaaggccacaccgattcggtgcaatctatctcgtggcatccatttgaggagtcggtcctggcaagttccagttatgaccgcaagattatgttctgggacctcagccgggcaggtgaggagcaaacacccgaggatgcccaagatgggccaccagagctgtaagtgaccacgatttgttttcttcatgcaatggtttgtattgttcgctaaccttgctccttagtttgtttatgcacgggggacacacgaatcgaatttcagacttcagctggaacctaagtgacccttgggttctctgttccgctgccgaggacaatctactacaggtatggaaggtagcagatgcaattgtgggcaaagacctggaggatgtcccaacagaagaaattgaggcgtagatattatttctaccggacttgcagttgtctcatcattttccatatggctgcttctttgatatagttgaatcaagaccatagtgagtaatcttaaaaaacactatttcctttgaaatctatatatattcttgtgcctataagggcatattgttacccatggccaccaccaaccatgatagtctaactaagttacatggcatttataattcttgtagactcgaggaccgcttagtgatatcagcattcgtttccaacattagtcattaattactaataacgaaggacctttagaaccgccgaaaatcgatcgctaaaacatccaagcagtcttccgtcgaacacattgattaacacacgtctgatcaagctccttatccttcgaacgagtcatatatatacgtcggtgtacccctgagctaacttaggtttcgtcagtccatatgactcgcttctaatcgttaaccttctagtaagcatgcttgagcgcaaaggctattcgtttagtacggtctctttccgataccacaggcttttgtgtagtaatgtaccggcggataccatggtatttcaggaagcggcgtagtgttcgtggacaaggcagattcgttacagtggttacctctgctattgtcatcctgcgagctgtggtgtcttgtcggataaaggccgtgattttgttcaataactgctggcctagctagcctagtcataccagtacggcggggccttccatttagataaataacacgccagaccgtatggtatctgacattaacctgcctcataagctgctggtatgttaaataccatactgtctggagtattattcatctaaatggaagacctgtggcctgtactgctttggtcaagctcgtttcggttctgcccgttactgtggtgacattcaaccttatatataccgagctccagaagttttgctacgtacaacttgggatgaaaaggttgatatttggaatctcgcggttctcataagtaggccatcaactccatttctggacaatgcaactaactcatccaaacatggaccattttccaacataagcaactattttatgccagagattcaaacaagaaacaggcaaacgcttaccatctcgctgagatgattgcgattcttggaccgccacctaaagaaatgttagaacaacgactatgctacagaattctttgatccagagggcacgctatccctaacatctacacgtcctgtcacaaatcaagcaattcaaggtcattggaagggagcggcacccattccatcaaccaccttagagcagcgggaggaaattttgcaaggtgaagagcaacaactctttcctgccttcatgcgcaaaatgctctagtggcggccagaggaaagaaattttgctagagaattattagcggaccagtggctactttcgccataattgaatagggccatttccggttgacagtcttgaatttataacataaatacatagatagtaggaatataataagggtattgatatgtaggaaggcggtattgaaaatccaggggtgcacggacccagtagctggggccggccccagaaaatccagtttatgcataaattacgtcttggcggtcataaacatataaaatctgcagaattatgcacacaattagcgtgtttgcatggtttgtaacccaatttggggtcagattgagttgggtccgggtacgagcaacaattccctaaaaaaatagttctctctactaacgaagcatctgggatataagctagactatgctcgaaacaatacaccgttatatgatatctcttaatagattatgaacctgaatcaactgacttagctcgagagtaaaaagtagaaaagggaagagagagaagcatagcagaaaaaccagcttggttattgattgaaagccggaaaaaactagttaaagggcaggtttgccggcctagattcgagagacatctcttaataactaatatgccgttgcttaacggctattgtattgtgcgtgccatcttcatgggggtgggatttatacaacacattttcagcttcatccataaaagcaattgaaatcacatcctctgtatctgccgggtcggtttgtgacttacgcgacctaatcccactatgttcgactattagcttgacagcgaaatggaattgaaggtttctaaaacgaaacgaactagatttgatatcctttgactctctcatcctggttccatatctgtcaacactagaaaatagtagaaagtggcttctcactcacctccttttctttggttttaactaatttcctcaaagatgatacccagggtctaggaacatgttcatgtgtgacttttctaccagcgtggcaagccgtgcaactgttgcagtgaacattgttgcaaaagttatgcaaagatagataaataaggtggaagacaattgtctaagatgaatgaaagtaacagacctaatgatgtccttaaccgaacgtgggaaatggtgtgtttttatacacggatcgattcttataatcaagctgtatgtctccggcatctgcaccaggatcctggtccttgcgaggggcagtatatttgatgttaattgatattagtatataaataggaagcattctctacgagcgggttcgatgtggttgcgaaggtccgcctagtacaagaagcgaaaagtgtaataataagccccttgtcgtagtccgtgcggccgatacgagcgctggtcgataccttgtctgtggcttttacgagactaatcgataaagcacaatcgccaaaagggaatgagatgattgggcacgaatgggaacggaaagttggattccctaggatctgtcatcataataccaaatttgcatgctgcattgcacgtggcgtgcctgattccaaacccccgtctgattccaactacccatccaaccttccacctgagtcattttctctctgagatgagtaccccagacatcccgatcaggttatatctatacggcaagccatttgactggtcggaagatgggttatttctgaaccagctgattgtggccgaaaactatttgcgatttgcacttaagtcttttgagcaaaagcggaaatcccacgttgatttacgagaggccatatgaatcagcaacatttggcgtagtataagacggagatacaccagcaattacggttatcccgaaaagtgggaacgcaacgcacctatggtcttaggctgctctacgtaagacctacattccaatcatcaatttgttgctaataaattagtcagtatgcgttatactactgttggaaagcccacagtgctagcagagctcttgatatacaccgcgatgcagatgattccgcgctatgacaaattgtaactatgaggagattggggtcttttttacataatttgacccttagcgaatttgggacgcagtatttagatacctgggggtttacagaacttcaccaaattctacaggattatcttcgctgattaagacgagataaaccctcattaattgcgctgatactcgtagtagaacaccgctcatatgggcaatttggctggtttcgtatgtagatcctattagactatgtatggtgccgatcgctggatgatcgccatgtgagcgtcacggaattaactaacttaaataggttagtggcacttatagaggactaatcataaatctagaccaatcagaaagctgttttgagtagtctcgcggcctggcccgttcatctcgttatcctcacctcactttgccatcaagtggcaccaaaaactatcatcatgattacagagatagccctgctacctgatactctcgctttgcagcgcaatcaggaccttatgagggaatttgagaaggcactcgagataaatttagcagtcaatttgaccactctcatccctgattcctatttttaaaaatatagacacacaaccacaaagtttagaaacaaaaatagccaagctcaatcaaaaaaccgtcaaggaactataggacccccttagaaatgatccaaaggtgcacttgctttcgatttcccccaaactatgctcgtcgttggcgattcgcaagccaaaccagtgaaaaaatagcaaagcctgatataatggaacaaccgaaagttccagactttcggatatgtcttgatagtgtggagatagctgagatcattttcccactttcgaaagatgtgactactatgctagtgcccttctcggatttttctaatggaaataagagtactgagtagccgctactcttagtaccgcgacgaatgctttggaactccaaaaagttatggaaaaatccgatacggggcattgtcgtttaatgcaattataatattattgcaaaacctatcacgataaacggcaactacacagagtatacggccttgcgataccttgaagaatatgttctggaaattcctgctcctagaccctatgcctttatcaaattcggaactttttataagattttcatatcctatattccgtctatgacattgagcgaagcatggccgtatctcttacacaaagagaagatttctatgaagtatcagctagatgtcatctttaggaagttgaggattgtgaggagatagatggccactgtctgggaaggttcggtagcgaaggagtaaatggacacgaaaccaatagaatcgtcagcacggccgctggatttgaccccccatcatggcagcactacatacgcctctttcctccgctcttttctcacagattctgttaaagggctggccttggcccatggtgatattagacaagataatatcatggtgaagctgaatgaagacaatatctgggtagttactgagatcatcgactgggaagacagcgggttctatccgaagtaccacgaatgtactcaactgaccaggacattgagtaacgaggaagataactggtatctctatttgccggcgagtatctcgccgctgcaatttccggtacgttggcttgttgatcgactttgggatatccatatcaaaaccacctagttgagtctccgtgtttgaaatttatttatatgtgtgctccccttcctctacaccatggacagaaacatggagtgtcacggagtatgacatatatctgcagtcagactcattgttatagaaatagcataaagattaaaccaagattagtttcctcaatccgcgatccttacagactttcagcctatcaggtcacaccacatcacgtgatattgtgctcgtacacttaggaaggccatttgcacagttaaacttcgctatttcgaacttcgagcacaataatacgactaagcccttgtctaatggtgttcggtcctgatagtagtgttgtagacatataatgactagtataatgactattcgcgtagagctggatctgtcctactgtctaagtagctagtgagctggctaatggcatttcgtctagcactcaaaatctgcagcgatctgacttcttttcaagattttgactctttgtatgcataatgtatgtacaacatactactcggccccgtagtccgatatctgcccgcggggagcatgtcatcattctggtcggttttgattggtgctgattggtggggggcgatgaggggacaaaagaaagttagtgtcgtttgctgaaaaaaaaaagtaaatctgatttccgatactcacctcgtttattattaatatcatcttgcaaatctgagaaggtgacatatctgaacttatatcaacatccaacttcatccttgaaacgtctccatcatgggttccgattcccctacaagccccagggcctcagccattccgtcccacatgttgaacggcagctccccgctgcatccaacgggcagccgtcattctcgtgagcgcgagagtctcaatacatccattcgttcctcttttgagcccagaattccccttgaatttgaatctcctcagaccaagaccgagaccaagaccgagaccgaggccgaggccggaactgagactggagccgcccccgcccagtccgtctccagtgcctccgtgccaattcgcagcgtcgcgccagtgcggtatgtatacagcgatataaccattaatgataatggtgctttcgattccgttgctaatctctgcctagtcctaccttgaatgaccctccccgcgatccccgggatgaggccgccccattgacacctgtagccactgtcagccggccacagagcccctacacattgacccctcctatcgactttgacggtctcagctggccttgttagtgataccacccctctcggtggacgccactgtattggtaaatgtctctaatcaccgtcacctaggccccggaacaagacagcggaaggagtcaacaccggaggagaccgcggaacggcttgaaaagatgtcaggagctgtccgaacaatcctggaatgtattggcgaggatccggaaagagaaggacttcgtgagacccccatgcgatatgccaaggccatgctttatttcaccaagggctacgaggagaatgttcgcgatttggtcaacaacgctgttttccatgaggatcacgatgagttggtcattgtcaaggacatcgacgtcttctcgatgtgcgaacatcacatggtaccattcaccggaaaggtaaattgccgcagatatcgatactgtgattatattcattctaacaatttacagatgcatatcggatacatccctgaccgccgtgtccttggtctatcaaagctggctcgtctggcagagatgttctctcgcagactgcaggttcaggagcgtcttaccaagcaagttgcgttggcgatttcggaggtcctccagccccgcggcgttggtgtcgttatggaatcttcccacctctgcatggtcatgcgcggtgtgcagaaggttagcagcaccactactactagctgtatgctgggatgtatgcggtccagcgccaagactcgcgaagagttcttgactctgttgaaccggaggtaatgccccatctcgccaaccaacctaacacaggttgttgatttttgaatttctggagttggtggctacctttcaacaggttttgagtggtttgcttttttactttacatcttaagcgtggattggtgtttctcttgtcttcccttctctcggttcttctgcacatactcaggcaaatatttgccctggtatcttgtcatgttcctcgtccatgaagctcacagccttcttctacgggaaatggcaaacacccactttctcgacccatgatggtccgaggaagaaaatcaacccccctcattccctatcctatatgccctttcccctaccatactaaaacaatacctcaagaggcctttgctgtacaatctattgagatctcactcgatagtactagcaaggctgtttcaacacttgatctcatgccgcttacgagcatccagtaggaattctgggagctatccacttagatacaatgtatgtattagaaccaatgtacttattagaatcaatgtacaatctctttctaattaatctctctcttgtttcctcgttgagaacagaaagacaaagctctggtaatggtgtgttgatgtccagcattgaaaagtgtcgagctggaaggcctacaactgatttttatagagctatctggtctctcttagggcttttataagactactcaagttctctaatgcttcatcaaggacgaggagtaatgtctaccacctgcctaggtcttgatgggctgtcaggtagttctggtccctgagtgacctcgtccatttgaagataggtactgccagaggccccttcaaactacactcctcagcgaggacatagttggcggtgaatgactaccagttgcacgtgcaaaggcctctcacacgtgcaccccaggctcgcttgttgtttatatctagtcctctcgcacacacactcttcttttccttcccatccctctcgtctctactatcccatctctccatccatccattgaagtctccattctaatcttgctctattcatcttcatttcgtcctacaaactattgattacttctacttgcgcttcttgcacgttttctgctactttttctacttgacgcacttgtgcatcatctttccaatcctacctctcaaggtctcttaccacaacacacgacgcgtcttccacggtcactaaggtgatatcggtatcatctatctctgtaagttgtctgagtcaatcctggttccttgatatgtgctgtacacaacactgggctcctatgcatatcacaggttttctgaatgaaagtgtgatgtggcatttgcttgtctattgtttactatcattattcttcctgctatgatctatgaagaattatttggatgtatgaggcgcgtcactaatcagtttcctaaaaaaaggttctcgcgttcaaacctatcgaacaccctacagtgtacctgaagtgtttgccctaacaacactgagcaccacaggtatatgaaacgcgtctggttgaatcaagcatgggacttactaacgtggaagtaaagggtcaaataatttatttgaacacaatggagaacgacgctcagcgctcggccagtgatgactcttcgagttccggtctctcttcccaggatgatgaccacgacctcgcccaacccactaccatcaatactactaccgacactagatcctatttgccctctaatgtatcccttgaaattctccaggcgcacctagacgctgacggctctgactcttccgatgcttctggaccgcgggtacatcccgacttcttcgtccatcttgaaaatctacgaagggtcaacgaagccaatcgagtcaacgcacgcagagatgctgaagcctggtatgaagctgcgatggggcacccgcctcagcatcaagatcctttgatgttcaacgggtcccagcatgaagcccctcagatgcacgatcagcctcagcatgatgctcctttcatgttcaacgggtcccagcatcaagcttctcagacgtacagtcagccccaggatggaactcctttcatgttcaacgggtcccatcatgaagcctctcggatgcacgatcagccccagcatgatgctcctttcatgttcaacgggtcccagcatcaagcttctcagacgtacagtcagccccaggatggaactcctttcatgttcaacgggtcccatcatgaagcctctcggatgcacgatcagccccagcatgatgctcctttcatgttcaacgggtcccagcatcaagcttctcagacgtacagtcagccccaggatggaactcctttcatgttcaacgggtcccatcatgaagcctctcggatgcacgatcagccccagcatgatgctcctttcatgttcaacgggtcccagcatcaagcttctcagacgtacagtcagccccaggatggaactcctttcatgttcaacgggtcccatcatgaagcctctcggatgcacgatcagccccagcatgatgctcctttcatgttcaacgggtcccagcatcaagcttctcagacgtacagtcagccccaggatggaactcctttcatgttcaatggatctcagcatcaagcctctcagatgtacaatcagcctcggcatgatgctccttctatgttcaacgggtctcagcatcaggcttctcagactcacagacagccccggaatgaaatttctttcacgttcaatgggtctcagtatcaagtttctcgggcgtccaaccagccccagaatggagcttcttcttcagtgcctaaccaaccccagaacggaagtttccaatttgccaacgaaacaaaccaaccttcgtaccacgccggtaccggaaatggattgcagccatcggcgatgggcatgcgtgagcgatatgaaacccaagattccactgcagccgggccatccgagccgtcgctacatgttcggtttgcgacacctactcacattggtccttctcaccctagagacaatcctcatcagcgtcggcctccttctccctaccctgtggggttccgtcgcccatatgcttctggtccaaattacatgtcaaatcctcccttgccaccgtatcctttgccctcacctcctttgccagtacctcctgtactagcacctcctgtgacagcaccactgcacccggattataccgaacacgggaacccttacagactcgcatctgagccagaattgcttcctgaggatgccatcactcatggtgaagaacgcattgttcaatcatggctcattcggcagcagcttattgccggaattcctcctcgggaaattcagcccatggcacaagcacgcgaaagacagcaccgaacccctccttacatcatgctcaatgagagcggtgcccatatcataagaattgaacctgcccgattcgagggtgccatgcttcctctcacaggtcttccttggctgccacagcgcgcaaattctagcgcgccagcctcatcggatgcacccgatgcttcgggtatgcccactggtcaagaaatcgcgactggttcaagcttatctagtactctgaactcgccgcttgacccaaacttgttgactgcaccaagctccccgcgcggcctagctgccgccaactcgccggttgcttcgcaccttccagctcctgcaaccccgccaactgtcccaactctcccggttaattcacgcttggctgaaactccaaacttgccagtcaccccggactttccggctagtcgaaatgcactagctactacaactctgctggctactttcactctgcggcctgactctactgtttcggacccaacttctgtgccagaacaaaattcggcgaacccaaatgagcatgtcgcgggaagtctgaacccggatccgcgtatggtggcattcttccagcctcttaggctgcatgaaacgacccattccgtcttggctcccgcggaaatgcgcgtagaagcaccaggcacaacccaggtcggcgccaacgagaaccgtcaaacttccgtggctacactgcagtcgccgtcgcagggcggcatgcccctgactgtgcagaactacaccgatgctgactccatcggttccccgggggctcctgggatggtcgtgtctcccgcccgctctcagggccaagggtcctctacggggaccgacaccgacaacatgccttcccccggggccccccagcttgcgctggagaaccgcgacgagccccccactcgtcgtgtgcatcggttcgcaatcgatggggtggatgagtcggccgaggtgggccgattctctgcggaagcctttgcttccggtgatcaatcctccgggggagggttgatctaaattttcaacgtttgtatgagtgaggcctctctgaggcgaatagtgcttacttcgtgagcacgaagtgaacggcgtgtgagggggttgtcaatctctgaaaaatgagatggagtatatgtagagtattattgaataaacttgtatgattacaattgtttcccatagtaaagctactaccaatgcacgtagaagcaatttctttgtatgtcgtcgcttgatcaatgtaccacggcaggtcacagctgcctataccaatgagcctgatacagaagatgagacaagtttccacgcgcgtcgcaggcgtttccttaccaatagagcgctaggcaaaaaataatactttgcactactggggctaatcccaagtcctgcaatgataggactctccatcacatcgacccttatgcagatgtgaaccgtcctatacagcttaccttgaaggactttgaccccctcataccgctccagctcgcctgcctcgacttctgtatcgagctcccgaaccaagatcgatgcgagcgaataggagcgcccactacttactgctctagctgtacagggtctcggactggatccaaattgggattagcccctgtaagagtagtgaaatcgctgtgacaatagtactgacacagatattgttgcgaagtgcggtctatttacgtacatacagggtcacgtgacctacatgtgaccccacgcccagttccggcacaacttcaacatgcccatgacatcaacctacctctttgccttctcggttcctcgctaagctgattcggcgttgcgggcatccctttatgcatactccgataatatattatgttgaaactaagtccctagtttttctggggaatgttcctttttttcgggtatgaatggccggatgagaatggccgggggtttgtgttccagcccatcccgctctatctcgggctgactttcaggccacgcccttgagttccctgcaaccacatccatatcatgagatgttgctttctcttagattacaaactgtcgatttttggtcctgcaattgatcttgctatttaatatcggaggcggggtgggctgcgcgcagggcctaccaacaggccgcacctttgggggcttgcgcattctactgcattgtactgaattggggtggaggaaccattgtttttaggctttttctgccttgacctctcgtacattgacctcattcggtatgcttcccacattgtcgccggcatattgtttggtcaaccgacttggagacctggacatcaccaacatgaattcgcacccttgtgtggcaggaccatgaagatgcagggcttgcaaatgttggcttgaaacaacatggcgaacagatttccgcccgtgttccatctctgtcccggtggtatttgtcccctgatagtcaaccacgagtctatctgttgtaaatcacgacaaagcttcattccaacgcgcacttttttcctggttcatgatgacccggacttcgacaactgaccaatctacaccttacaagacatcgaagaactgaatggctgggtgtcatacagagcatcaaagatgtttgcgacaaagaatcacagcgtgtcaattcggtccttgaaattgaccaacagctctatggtcttgggaaagaatgataagagactccagccatttatttgatggtgtgacctgataatccaacggggattgtcctggtgccccgggaatgttggcccatctggccttgtgcaatacgtagatagtttcattcgtgggacaacccaacgcagtctcagtttggctttgtcgaaaacaggctgctgtacaaaagggcatggcgagcacaaagcagacaatatgctagcaagccggctagcatgcctgttttatccgacacctgggcaccacctgatcagatcatcacgtgctagcagacacagactggacacattcggtatccaaaaagaaactcggagagagcaaaggagaagtacacgttgcacttatcttcgacatctgcacgccatcccccagcatccaagtgtcgaatcaagttgtagagccgcaacactgatcagtcatcaatcccgaggtccatgggtttctgaccttgaaaagcccaccctccacggccaagtagtgttatttctttacctgagaggttgagacaggtgtatatgataaatctgaactggtgcgtgtgccccattcaaccctccccttgcttatgttttcgttgttcaccagcgcttgatagtgtacacagttcggatctggaagaactgtcgttccgagtcccccaaacccgaaagacttccgcctgcgatcgcagacacgctcgaacgccatcgctcgctgcgctttctcatcattatctctacttcaacgcctcttccaaccactggccgtgctcacattatctatttcgccctgattgagccagatgccgtttgcgacgtctacatggctgggtcccgtacgagtccggtgttaagagaccagtggagcgctgacccagaccgtgatccccgcgacatggatagacggagaggtcgagggtcaggccgcgatcgagggagaaacagaggtcgtgaccgaggccgcccatatcggcccaataaccgcaatttcgatcgcctggggcggtcgccaccacgcgcgtcccgctttggccctgactcttctaacggcatgggtgatttcgctccagatcgatctcctcctcgaggttctcctccacctcgtaactttcacaacaaccgtcgactagatccaacccaaccagtgacaccagccggtgactggaatgcccatacttctggatcttttgacagagaagaccccggtcttcgaagagacgagtcagcaaccggacctccacagaaacggcaaaggactcgaagcccatcaccgcgtggcggtcgtggccctctccctcccccgcgtccaaattactccgataattgggatatccgggatcgaagcccctcattcaagaaacgaggtggccgcaaccaaggtcgtggtgctccaaggagaagatcaccacgccggggccgggaccgtcgtggaaaagaccgtcgtcgtccagacatcccacgcccgggaaggtctagatcaccggttcatgaacgagggttccgtccttcgcttgatcgacggtctcgcacccctggtggtgacaatcacagcgaccacggatctcactatcggtcgaactcacagcactcagtacggtctgcaacctcgagatattctgaatcttctcgcaggtcgaggcgtaactcggcgatgaacacaaaccgaccaacccaatccgttgtggacgatactgctcggcctgcatctccaccgcgcccgattccaagttttgactctgataacctcggtgatctcggagaacaccgagatgagttgccaatacatgcgatgcgctctgatgggaataatcagtctcgccatcggccgtctcgaccacatcttgatagccggccctatgcagacgctcaaaacggaacaacaggctcgtaccccggttcgcctcaaccaccttcaccttactcctcaggaagaggaggatggtcgggcccgcctccgtgagtttttggattgctttcacttacatgttacattctgaattatactaatcctctcttcaagtcatgcctccccttacaggaacgatgactattcatcgcaaaatggaaactattatcacaaccaaggtcaatttaacggccctggcaataatcgcccgcaatctccctatggcgggcctcctcaccgaggtggccactctggtggcggtcatcgagggaacttttcaaaccaaggtcccgatcggagattttctggctctggccctcatccataccataatggaccctcacaacgcggcgcgagaagtcatttcaacaacttgcaatggactgcttcgggatcacgaggccgtgggggacaacatagtcctcacccggcgcacatggatgggtcacaaactcccagtcgaccgcagtcccacaatgaaccgcaatcaccccgagccggcgaaagtgaacatcatcattcccggccccccactagggatgaagagatgaaccaggcacaacctcaatccgccggcgggaatcccccatccatgccaccccaaactcacgaatccaacgaaacaacgccggcaaacaagggcggcaaatttagctttgctttcaagtcaaaggctgcaccttctcccgccccaaagccagtacctgaccttgcccagaggatgttgcaggtccgcgaaccggcccctcgtgcaccggaaccaccccaacaacctcgcaatcggttcaccaatgggccattgcccagatttaagccagactcaagggctgatcgccgtgaccgagatcgtggacgaaatcgggatcgagaccgcagagatttccgagaaccacgagaattccgtgatccacgggaccgcagagatgatcgccggttcgatcaacgtcgtgatcggcggcaaggcgaacggccaccggacaggccctcagactggccagatcgtcgccgtgacccttctccggaaccgccaagagaaccatcaccacccaagcaaaagcggattcttacccgtcctaaaccacgtcccacaattcccgctgagttcgctaatgccgaatctgtgtactaccgaaagccaggaaatgagtctgtgatcggcgctgggacatatggaaaagtgttcaaaggaatccacgtctatacccaacgtaaagttgcattgaagaagatccgaatggaaggtgagaaggatggcttccctgtcacggctgtcagagagatcaagctgcttcaacatcttcgaaaccataatgtcgtcagcctcctggaggtcatggttgaaaaaaacgaatgtttcatggtctttgaatacctttctcacgatttgaccggtctgatcaatcatcccactttctctctgactctgtcacataagaaggatctggcgaagcaaatgttcgaaggtctcaattaccttcaccatcgaggagttctacatcgcgacattaaagcagccaatatattgatcagcaaccgtggattgttgaagtttgccgactttggcctggcccggttcttctccaaaagtcgtcaacttgactacaccaaccgtgtcatcaccatctggtaccggccgccggaactcctcctgggtgaaacccgatatggccccgctgtcgacgtgtggagcgccgcttgcgtttgcatggagatgttcaccaaaaaggctgttttccccggtgaaggtggcgaattgagccagatagacaaaatatacaatgctttgggtacccctaccaagactgagtggccggaccttgtggagatgccctggttccacctgatgcgacccacagaacgaaggaagcgtgtttttgaggacgtatactgcgatgtgctgacaaccggtgcgatggatcttatatcctcgatctttcgctacgacccttcaaagcggccgagtgcggaggatgtccttaaacatccatactttgtatcggaggaaccaacccctcatccgccgattgagtacgttttcccatgcccccgtttgtatatggcccctaataacctttgtctacagattggagcacgttgaaggcgactggcacgagtttgaatctaaggcgctccgtaaggaagctcggcgcgtcgagtatcagaaccaaaaggatcgcgacaagcgcaaggccgacacatcggtgcccagcagcgatcgggattccaaacgaaccaagcaggattcaagtgatcgtgtctctgcgcagtgatgactcttgcttcgcgaattattttattatttattttcttgctgttttaatgcatcggacatggttgacatgattggtggactggggatttactttttcacgagattcactaccctaggtactcggagttctttcgggcttgttcttgtcacatattgcccattgatcaataaaatttagatcaaagttatttgtatggtcaactatggatatcgaaactgtagattcaacaggtggatatcatctaggtaagctaatgcatgtcggttccagtccatcgggcactaaaagagacaccgatatagcatatcccaaaatatatttcaaggctcagactttgcctgttgaccgcatgctcgaccagcccgtgagcccggaggccaaagtagtagggcggttgagtcctcggattaccagagagctcaaaagagtttcttcattgcgttgaaatatagaaatggaaatagagatcgaaatggattgctattgaatacacgtaccctatactacatagacaaaagagacaaagaaaaggatgtgccgtcaatcaggtcatcaacgtttcatgggtggctcgtaagccctcgtgatgatggttttagatgcgatcatttaatctcgacacacacatcggaaacgccagtgctgtaaaaacaatgagtcgccagcgttgatttgagttggtggtcttgatataagaagaaaagaagaagaagaagacaaaagcgaaaaacgaaagaaaaagggaaaactggaaaaaagacggtgcgggctgcaggcgaaaatggggctggccgggcgctgattggccaggacagctgctcctccaaactgcagtcgagtctccgattcatgtcgacacttttccccttcacctgattccccctctatacctctgtttgtctgtttctctattgcttctttttactcaagcctcattacccccatagttcgattcttcccgctttctttgttttcttctttacctgcattactcccgaatttcttcttcttcggaatttcccatcggccactatactacgtcactgacacaatagcgccgacgtctcctttcgctgtgtaacgcttcttacggatccccttctttcccccctgatgaccgctcgtgtctcgggcagtcttctcacccgccgcgatggataatgcaaacctgtggacccgccggacaaagttagtcgtgtgcccctcctcacccaggtgaccattgtaacttatatggcggttgtttcttctcattagctcgtccaagttgtccctgtcaacgtccggagcggacgcgaaagacggtgcccgtgtcgaactgccccgcctatcgaagcgcttcggacccgacagctcgcatggccgctcgaatccattcaacgcaatatccccattgtccggcggagtttcttcgccatccaccaatgcatcctccgcttttggcctggggtccggcgcattcgcctcattcggtgcgccgaagactcccggtggctccgagttgaaaacacccggacgggagtcgcacttggaacacgacgaggccactcgcaaggcctttgagaaccactccgttgctgctcctggtgagcacccgttgaagtctacatggattgtctggtatcgccctccgacacccaaatactccgactacgaaaagtccaccgtgccactcgcttcgatatcttccgtagagagcttctgggcagtatactctcatcttaaacgcccttcgcttcttcccacggtttccgactaccacatcttcaagaaggggattcgccccgtctgggaagatgaggcgaacaagcggggaggtaagtggatcgtacgtttcaagaagggggtttccgatcgttactgggaggatctcctcctggcgatggttggggaccagtttgcggaggctggggatgaagtctgcggcgctgtgctgagcgtccgaggcggcgaagatgttttgagtgtttggacgaggattgacggggggcgcaacatcaagatcaggtatgtaaaaaagtctgttttaactcatcatattaccggtatatctaacttggttgcagagaaacgatcaagcgcctgctttctttcccggcagacactaacatcatctggaagagccacgacgatagcattgcacagcgctctgccatcgatcaggctcgccacgacaagactgccactggcacgggtcatcaagaacggcggcgtacaggtcaagatgactcggataaggtcaaagtgcctgtggccctataagaggatccaagattccagctggccttggcccctgtatagtaaacccgaaaaaaaaaccttcaatcacgaatcattgggacgcgtttgggtcttagggcggtggggcatcgaggcgaactaagcggtttggtttgattatttatgctctgtgctatgtgtttttctttttttttttgtgtctgccgagcttatgcgtgatgttttcctttatgtacgcaacatgaatgcagcattggctgctattggttttctcgcctggtttgtgtgatgacttggttcgtttgatgtgaagtagagcccttttcacttggacttggccgagcttagcgtcagggctctgacagatactccgactagaactatgtatgcacaagccaaacaaaggtaatagtgcatggtccggggatctgggtacaagaaccaatgtgcaagccagaagccctgataagtatgtattgggttgtattcacgctattgggtattagggcattgtgctattgtgttgaatagtatcaatccaaaaggtatgaacaaagtgaatcattcaacaatacaactgacttatctattcatctattgattgatctattgatctattccaagatagttagttagttatcaagaatgaaacctgcatgcctaaagcctcaggcgccaacaaatgctcaccgccctaggaccagatgacgatgcggcgtgcttgctccgatgaatgagaagaaaaaaaaaaagacaatagacaaacaatcaattgaataggatctatgcaatgcatattgtcatgacactgtggctgccttcatgcctgtgtttaaaaacttagtcgaactcttctctagcttgtcaccacgacgcaaacgtgagaccgaagatcaacgatctgctcttcaacgggcacaaccaccgctctcgacccctcctcgttctcgaccagctgggtctggtcgtaatccttttatcctggcacctgacgaacccgatctgaccgaaaccatttctccccagaacgctgcgatcgctcctctttcaacggtgtgtatctcccgctatctcgattctccatgcgtcttagccatctatgctcctttttgataactcgaccctgcacaatttcctcgcattgggcacttatctcttggctccgcatgttttcttattgcaaactaccttcgggtatttgacttgggactaatctctcttatcaggttgttcatagttatgtcgattctttttcgtctccaactggatctacaaccgcagaagaaccattgcgcacacgtttctcccacccttctctgagtcccattacccggttagacatgtcccgacgaaacccacagaactcccctgccggcaggccagagctgatgtcctcatccattcccaggccgggtgattcgtcgcaaatgttgaacaaggaccagcaaacggattcccagaatcggaaagatgaggctcggttgcttggaggcagataccagtatgtccttagtgtgtgtgttgagttgttcgagatgttgttgctaaccggctggctttttgcttggtagtgactctaacgctgtcaagataaagctcggagcatccctcaatgctcggaaaaagattccaggggtaagtttccgcctttatatgaatggatatggcatgtctaatcctcggtcatagtctaccttcgcgttctccccccgggacaaaatttcacagaatcaaaatacccgaagcagcgggccagtccgttcttacggagaaccaaatcaacaaacttcccggagaaagtcgccccaattcgaggatgagtttgaagagtcgaatcgacctaccaagatgcggcgccagagtaaaaccaacgaaaccgtcgaccttacggccccaacgaaatcagccagaaatcggttggaacagggactctaccgccacccaaatgcaattcgtcgcaaccgacttgaaggttccagggacgcggaggatagcgtcaaaggagctgcgcaaagctctaatcgtcctcgacatgaccaattatcttccgttgactctcgggatgaaatgtttaccgaaacagcagcacagcagcgacgaaatcaggcggattccaggttgtctaacgtaaatggcaaattaaaccaggctgcagaggccgttgttattgggagcattgaggttggaccaaagagagctgatcggaaccgcactgcagttcctacgagcatacatcgtcctgtcaacggcagagaaagtccagacgagcttcagggggatatcaccacacaaccagtaccgagatccttatcgggaacacaactccaagccactcgcccatccaaacccgagattcacatagaaacatcgactcgaaaacgctctccgtccgctacccgaagtccagacttttcgccgccaacaccggtcatgaagaaggctaagatatctcaaaagaactccgataagatacacctagtgcgatatttccgaatcggcaccttcggcaaatcttgcgattcgaggcaattcgtcccaatttatctaaccaaggatggctttgagcttcgtgagaatgcactcggccagggtaacacgatatcaataccttttcacgaaatccgtcaaattgtcgtcggcgagacgcctagccggaaagtgagaatcaaaatgttgcagagtgccgtcaaagaagacgatcagcttgacgttgagttctggaccaccgacgaaaagagaaatttcctggaagtgttgaaacaggcgaaacaggcccagcgtcccaccaaagatatgtaagttttgtgggctatctcttggatgagttcgcgattcactaacattgcaataggaaatggatggacaaggcgtttttgaagtatgaaaaacaatttccacgggagaacaagcggcctaagaagcggctacttgatgacttggtggacgatcccgatcctgagcactctcctcctccttcgcgacggcccaaactttccaagtccttgagagatgaccatggtgaagtcaacaatgtcaattcacttgagatcaaatgcgccgctcaggaaaaagtaaaacatggaaacggcaatgttgattctcgaacgtctgccaaagaacaacagaattctcgacctcttgataccgatagtggagctgatagtcgatctaccgttaacccacttgaacgcgagacccgctcttctacccgccgtggcgctaaaaagctgtcaaatggagacgttatatctgaagcaaagtcgaattcatttcccagggatgattctttcaggaaaaattggaagaaaccgttggtgtatccgcgaaatggaaagaagaaggctgaggtgacactcgttgatcgagaacggctactgagggacgacttcctgaacgataacctcattgctctctacatgcgcttcctccaggatcatcttgaacgcaccaacaaagaggctgccaagaggatctacttcttcaatacctacttctttgcgactctcacgaataccccacggggggaccgtgggatcaactacagtggtgtggagaagtggactcggaacgtcgatctcttcagttatgattatatcgtcgttcctatcaacgagaatgcccattggtacgttgcaatcatttgcaacttgccaagcttgtcccttggttctgctgacgccgtagagtcggttcgaagaccggctctccaaaaagaatcatccaatgcgtctgagagtgagatccaggaaattgaggagacacctgagccggaactaaggtcaaagtcagagctcaacggttctagtgaagccaaccaacctcgtgagattcgagagggatctgagaccagggggcagactgagggagatgagcatgcgatgaagccagaggagcagtccgcatccgacaactcacttccacccccaaatctctccaaattcgcaggccaaaagctcgcccaggaccaggccgcggcgtcacaaccgacaaccaaatccaagaagaaaagaagtgggttaaagttagatccgaatcaaactacgatcgtcacgttcgattcccttgatatgcctcgctcccccaccatcaaaatcctccgcgagtacatctgccgcgaagcggagtctaaacgcggcgtcgaacttgacccgaacgacgtcaagggcatgcgagctcgtgatatcccccttcagcctaatttctgggactgtggtctttatctactggcatatctagagaagtttgtgcaaagcccggattggttcatcacgaaggtactacagcggagcatgaattctgtcgatgactggcctccactaggttctggtctcctgcgataccgctttggcaagtttctcgatgatctatacgaggaacagcggcaagccggtgagcctatcatggcagtcagacggcctatttcattcctgcttggcccgcctcttccttgtcaggacgaaattgcggatgttgatgtggtacctgagtctcagcatgagacagattcttcaagggacattgcgaaacctgtcaattcaaagaccgaagactcgagcgaagattcaaccgcggagcaaatgcatctcttacctaccgaaaacctcccgaaaccaaaagacccgaaaccgaaaacatcaccctccaacccacctgcagatgcgaagtcgcaaaatgaccatgttgctccagcaaagggggaacccatcatccaagtacccggtagccaggaagagcccgaagtgccaggcacaccgtcccctaagaaaaaagaacgaaggaaacacggccattcgcgaaagagatgaatctgttcatgcaagtgatacagttattgtcaagacgatatcaacacagtaccggctggaccgggactgaccatcatgaatccaaatatgttcactattgatttagcgtttaacccatgtacgcagcatggcaaaccctgcgtcagcgttcgatgaaagaaggatggtgttgttttttcttcgtgtctttaatggtcatagcataagataccatcacctacatcgaaatgcaaacttaatgtcttttccgagaaaataccaataatatatgtaattaccactcactctcatccgcctgaacccaccacgccattttatccctcttaaacgactcaaaatcccactccgaatcctcaagcatatccttcccagcagtataaacataagtcatagccaaaacttcctccccctcagccgcaacctcagcgccggtcgtcgcattgagcatttcgcgcagctggttctcagcagcaccctcgctagaattaacgtggtcaccacccaccacagcccgcagcgtgcgcacagtaacccgtttcttctcatactccgatccctcaaatctgtccagtcggtgaacgtcgccgtctgttagtcccgacacgagtgttcctacgacggacgtcccagcgctggttttcggtgcagataaattggtctcggtttctgtctctggcaccgccacgatcccggggtaatcggcgttctgcacacgatgccgtcggtacccttgtagaatggcgggttggaagcggagcatggctttttgccagggctctgggttcgcctggccgtggatcactctgtggaggatttggggcgccattagggttcctgggtagtttagttctcggtttctcttgattcaagaaggacttaccgtagaagaagaggacgtggtcgcccattgtgtatggtgtggggtcgggttggttattgcgtggggatcgagggaggttccaagataagaaattctatagagcttgaggtaaggtaatatgtatattcgcaaattcagtagaagcttagagtataaagagaatcacaagacaagagaagagaggaacgaagccatgagagttgtgtttattgcggagatgacgagtttatagatgcgcttatcgataagaccccaagatccaaaggcccagctggcttcatcttcccaattcgtcccccaacacaccatgcattcctccctgaaccgcatccaggccgtattcggcttcttcactacagtcgcgctggtagtcagcgcactggcagccgtctcggtcctcttcttcccagcagacgagaccaatgcctccgtgcagctgaagaacgtgcaggtgtaagtgaagtcgcgatttgcagccctaagacttcgcaaaagccccccatttactaagatccgatttcgcggtataacagcgtcaaaggccgaccgcactactactccactaaacgcgaagaatacgcccagttccgcttcgacctcgacgcagacctcagcccgctcttcaactggaacacgaaacagctcttcgtctacgtgtacgctacctactcctcctccgagaaccccgactcgcaggtgcgcctctcggagtctatcatctgggacactatcatccccgcgaccccgtcgccgtattcatgggagatcctcaaggataaggtcatcgcgcttctccccgcggctgttttgtcggattctgtcgccgctgcacagaggaacgctaagcgccatgctaagccgcctaagaaggcgaagaataagaaggcgaccggtgtcctgaggctgcgtggccagaagggtaaataccaggtcagtgatattaccggtcggctggcggagcgtcagaatgttacccttcatgttgggtggaatgttcagccgtgggttggtgctttgttctgggcgcctggtacgggtgctgtgcccaggactgccggtacgattgtcagcagtgagccttttgctttccctgaggagaagactgctgctgagaagagagctaaggaggcagccgaggaggcggagaaggtgaaggtggagaaggcgaaggcagaacaggccagtgtataggctttgattgggtctgttgatatagggagttaggatctacctttttttgtttacttttgggagctttggctcgccttatacggttgcattttgggaatgatacatatgaaacgcatcatcattggatagtgcaaacacagctttgtcatttcattttttgttttaggtgtccggttacaccatgaagaacaatggtcgacgctatggatacagcagaggtaagactcgattaggtttaacgtcatagagaatgccgaccgtggacagactaagacaagcatctcgaacaagatagtccggagttcgtccaaagcaaatcaaatggtaccgtaattaacgcctgcgggtggtgcatgatgatgacctccgttctggattcgatcggagtagacgccgggtgcgggttgttgagaggcacgagtcaacggatcccgattgcgacgatcataataaacgtattccaaatagaaggcatggatgtgtccggggaagtaactgggagatatcgctggttagttgtggaatgtaacgggaagtctggatgtatagcactcacccgagaagtgtgagcaggaggttgatccagaagtcaactccgcagcctgaaatcataaaaacaccaagagggggaactgtttggttcgttagcagatcattctggtggataggttggtagatcgaggggcggtggatcactgtgtggggatgggttttgtggtagcttttgatgtaatttccaacagcagaggtgtttacttactgaatatggtgatgatgatcaaacaaagcatggagcaagtgccggccatgattgcggtgatgtttgatgtaggtgttactgttcaggtttggtagatcgaggcttgaaatcggtagtggccaaaaaactaagaaggagaattgcaaagaggaggatgaagatataaataggggtgttgtcctcggcgggagagttgttgcgtttcatcttgatcttggccacgacgtcacaaggtctgagggaactcgtacatagggctgaggcagccgtgaagctgatttgctggctgagtacatcatgacgtcatctatagctggcacctggacaccgccacatgccacgagtcaatacgtggctggtggctgtacagagacggcaagtacaattgacgggcacgtacattgaacggacttggagaagatgtagaggtactgggaatatatttcctgtgatatccccagtatcaggtcctaaaccgcgtcaatcgccgcccgagttgtaacctgctcgttcttgttgccgagcttcgagaactgcaagaatgcgtccactccatacccttccagactgtgcagttctaaactgcctgcccaatattcagcatagactcggctcatagggagacccatccctagacggagattgggcggtcgggatgtcaatgtgtccagggatccctcatggtatgattctcggtcggtgtgtttacggtcgtgtgacacttgcagttcttgcatcgtcgccgccattgcgggcacctgtccgagattttccagccgtgtttgcgtgcgaggacctttgctaaaagaccacagatacggcagaatctctcgagggattcctcctccttgatcagatatgcgcatgatcacatgctgcggggtctcgcacacgagcacttcgatagggggtgggggttcggttgaatcctgataccgctccatcactgcctgcaccgagtttcggagaagttctccgatgatatattccaagtggctcaatatatatgggaaggtcgcgtcggcatggcccttcacgacgatcgcggggatctgggtcgaccccgatatcttcttcatcagatcttgtgcgacctttccacaatcctcgattacctccttcgccttgcactttaggaacacttcgccgacaaattctgcattgatgtcggttcggtcgtgggaatcggggaaatgccatggtgagttgaaagtttcggtcagagctaggtgctgctctgcgatgactcggcgagagattcgctaccgataagatacttgtcagctaggaggcaggccaaaggtcgaccttacataccgctcgcagaagtgtgttcattaaccggtccatttcgtccgctggggcgagatttcggcattccagcacgcctatcgccaggttgggaattgcaaccagatgttctcgtagcatttccttcaggatgtcacagaaacggtcattatcgtcaagcgtcttaatctcaggaaccacccgagccctctcgaatgctttgtagtacagttcgtatacaagggtgagatgggggttggcaactaccacatatggcagctgctggatgtctcgcagacgatgcgcaaggctgtcgatgaccctgatcagccttttattttctaattctgcaattgactctcaacttaccgagtaggaagctcggtccgcacgtagtttgcggagctgataagtcgtggttcggtcaaagtacgaccaaaaaaggtcaactgacgaagactgataggtcgaatagctcgctccacccatctgccagtatatcctaattagtatccccggttcaagcatcggaaatgtgagtcatccatactcatctactgcagaaactggccgccatggcggcgggctgtgagctccagaatagaggcgtttcaagggggattggaggagctgccagcgtctagctggataagacaatctcattgtgctccatggacttattcaataagtgacagaccatagaagtgctcactatcttgtgcgtgcgcgtagttgggacttcaagagtttggggttgccgggcggtgagccaagcatgtgacaccgacacaaggcttgttatggcaagatctgttttttgctgtctagatcgggatatatctcgatatatatggaacgttctaagactgcaaatgccaatgtcatacgatctggattctcgtccgaagatgcctcgggtataaggcactcgcacggactggggctaagctcgtgggccctttccaaggttggatcatctgagggccacggcatatttagtgattgagagcataattaaagaagtatatagagcttgcagaacttaaacgtatttaggtcgctatctatatcaccgctaaatcggcccggtataaaaatagggcttttcttcaccgtatacttcgcatctagtcactcctgcatacattattgcacactgccaactaagcaaactccttttagttccaattcaaagtgagcgacaagttagagctcagtaaaaaaagctgtcaactgcagaaatcaagcacatcaaagactgttttcacagacatcatccaccaatatcactgccgagccctcgaggctccgccaccgctagctccggcccttattattttgcgggttcagacgaatttcctccaccaccagctctacagtgtatttcttgccaacattccgtcttcttattcacaaaaatttcctcaaaatacaacctctgacgccttccgggacgggaaggcgctttccgcgatggaaaacgtaagagattccccgaccgtgcccctcgctagtgtcgtcattggatctaaccctgctctaacagctcgcggagaacgacatgcttgtcgatgagtacgatcaataccctgccgaaaagaccgatgtcgtcgtcgtatcccgctcggggtccgacgagcctgagtccgcgccgaccgcagatgaccgtatgttctttgttgcttctccttccttaccacaagcaagagggctgtttgacgggttagctaggcaaagcatggcacccgaatgagatcgccctcacgctgtgcactgcctctttgcttatttgtgctaagcggtcgctaaccaagagccccggtggatatagatgcggcgatgatggcaaaggtcctcccccacaacacggacctcgaaaccctagacgaggtctataacacatggcgcttgtcagactggcgcaagatggagcgcaagtcgcacggacccgtcttccgatgtggtggttcaccttggtgagtgcttgaaaactctttgcctggattggctccatggctctgtgccggcattgaatctgacacggaaataggcgcatcctcttcttcccctacggcaatcagaccgaattcgcctcgttttacctcgaacatgcgtgggagaacggacccccggagaactggtacgcttgtgtgcagtttgcgctggtgttgtcgaacgtgaacgatccttccatttatacacaccatagtaagatattcaattccggaggaatcgcttgatcaaaacgctaagtcgaattctagttgcaacacaccgtttcaccgccgaggaaggggactggggtttcactcgattctccgacctcaagggcctgttcagccatccgtgggagggaaaatccgtcccgttggtgcaggatgacgaggcaattgtcacggcctacgttcgtgtagtgaaagatcccacgggggtcttgtggcatagtttccaaaagtgtgttttttccgcgaggtttgacccgagtgaagctaactttctctttttagttatgactcgaagaaggagactggaatggtgggattgaggaatcagggagccacatgctacctgaactcactgttgcagtcgctctattttacaaatgctttccgcaaggtatgaaagggaaaagttcgattgctcccgaattatggagactaatgaaactcgttaggctgtgtatcaaataccgactgatcaggaagcttcgcgtgaaaacagcgcgtgggcgctccagagactattttacaacctccagaccaatgatgttgctgtttccacaaccgagctaaccgcatctttcggatggcaatcgagtcagatctttgagcagcaagatgtacaagagctctcgcgaaaactcatggaaagattggagcacaagatgaaaggtacgattgccgaaaaagttctgccggatctgtttgtcgggaaaacaaaaacgtacatttcttgcatcaatgtcgattacgagtcttctcgtgtggaagacttctgggatattcaactcaacgttcgaggcaacaagaccttggatgacagcttcagggattacattcaggtcgagaccctggagggggagaacaagtacgaagctgggcagccatacggtctgcaagacgctaagaagggcgttattttcgagagcttccctcccgttctgcatcttcatctcaaacgttttgagtacgacctcaacctcgacatgatggccaaggtcaatgattatcacacattccctatggagttcgatgcagctccttatctttctgagagcgccgacaagtcggaatcctgggtttaccaattgcacggtgtcctcgtccacagcggtaacctcgatgccgggcattactatgccttcctcaaacccaccaaggatggacactggtaccgctttgatgatgaccgagtcaaccgagctactgacaaagaagtcctggatgagaactacggagactcccagcagcgcacgaacggagcgactggaggacggtccgctatccgcacaaacaacgcctacatgttggtctacatccggaagacaagacaggatcaagtattattaccggtcacaaaagatgatgtgccctcccacatcggtatgttaagagattttccttcttaggagaattggacggctggctaactatggaatagagaagcgtatgtcagaggaccgggcggagatgttgcgtcgcaagaaagaaagagaagaagcccacctttacatgaatgtcggcgtccttgacggggattcattccgaaaccatcatggcttcgatctgactagcaatgacctacccgcggaagatccggcgcttcccacgcaatacaagattcttcggacaaagaaagtcagcgaatttgcacaggaaatcgccgaagaacgaaaactcaaaccggaagccattcgattctgggtcatggtcaaccgtcagaacaaaacaacccgacccgatcaggtgatccgcgatcaggaaatgactgttgaggaggcgtacaacaaattcggcactaaaggtcagatcttccgcttgtggatggaggtggcgccgatcggcgcagacggacaacctactccatggcccgataatgactcgattctcattttcctcaaaaactttgacattacgacccagaccttgactggtgtttgctctgtctacgtccacaagagccagaaggtgagcgaactggccccgacaatcctttccaagatggattggcctgccggtacagagttcatgctctttgaagagatcaaacataccatgatcgaccttatgaaaccaaagcagactttccagcaatctgaaatccaggacggcgatatcattaccttccagcgctcaatcaaggaatctaatctgccaccctcggtactttacacagacgctcggcaattctacgattaccttttgaaccgcatggaagtacaattcgccccggtcaagaccaatgagggggaaactttctacttgactctcagccgcaaaatgacctatgaccagttcgccaagaaggttggtgagcatctcaaggtggacgagactcatcttcgatttgcacccgttatggctagtactggcaaggccaaacctttcctgaaacgaaacgtcaatcagaacctctcacagatccttaacggtcaatatggtgcctacgggtacaccatgcaccgggcagatgctttgtactacgagatactggacatgagtttgacggactacgagagtaagaagtgcttcaaagtgacatggctccccgatggcgtcaccaaagaggttagtgttaagcattccatatccatgccgcagggctttggctaatattcatctaggagattgttgagatcttggtttcccgtagcggtaccgtcgcagatcttctggctgcgttgcagcagaagttggaactgggcgatgagccgatccggattgccgaaacacacagtggaaaagtctacaaagaacttcggagcgaccaaagcgtggctgccattaacgagtacgccacactgtacgccgaaaagatcccatcggaagaattgaatatgaacgccgacgagcgcgtcattagcgtgttcagcttcgatcgcgaacccagccggactcacggaatccccttcaaatttgttctgaagcctggagaacttttcgcagagacaaagaaacgcctttccgcccgcacacagatcaagggcaagaacttcgagaagatcaagttcgccgtggtcccccgtgcatccttttctaacgccaagtatcttgaagatggtgagtgccttggctttgattccattggtcggactgactaactcctcacaggtgacatcttgtcagatatagcggctagcgccgatgacttcctaggtcttgatcatcccaacaagagccggagcttctggggcaagagtgatggattctccattcgttaaacaagtgttaaagtcatggcgctggggggggggttacgagtcgagggctatatgctgcaatccggtacatgagcagcgacaccctgatgcgatgatcatgcctttctcttttttttttgcgtatttttttcatgtaaccagtcgaagtagaagacaataccgtctgcatgatgagtgcaaattgtttatttcccatgtgtgttgtgtatccctacaaaatagactcgtgaagtagtcagaagtcgacatatgcggaagtttgtttgggtgcaaacaagtcaaacagccgaagacaaagttggcccgaacggactcctgacgcggatatcatcccccagttcaacggtccctctcggtatatctgtctcacaatgcggttcgctcttttcgccggtctggcctccctggtctcatccgtcaccgcaactgccctgacctacaggctcgaggcgaacgagaaagcatgcttcttcacaaacgttgagcagagcaacgccaaggtggccttctacttcgcggtacgtccaattggttattcatcaaacacattcattcagtgatattttgttatggtcgcggagctttggatacatttggtggtgccgaatgctaataatgtacgatgcaggtccaatctggcggttccttcgatgtcgactactccgtcaccgcaccgggcggcaaggtcgttttagacggtgccaaggagcgacagggcgactttgtcttcactgcgcagagcatcggcgagtacaccttctgcttcaacaatgagatgtccacctttgccgagaagatggttgacttcgagattgcggtacgttccatatccatcgacttgacgaaccggtcaacaaatgctaattgagccattgaacctacaggtcgagaacgaacagcgcgctcaattgccctcccgccagggtgctagccccgagcaaaccaccagtctggaggagtccatctacaagctgtccgcgcaactctctaccgtctcccgcaaccagaagtacttccgcactcgcgagaatcgtaacttcagcaccgtgcggagtaccgagcgtcgtattttcaacttcagtgtgattgagtctttgatgatggtttccatggctgcgttgcaggtctttgttgtgcgcttcttcttccagggcgcccggaaaggtatgttcatatgttccccgtatttgagatcggatataggcgcaagtcatagtcgtgtttggactgttgccgccgctgtctgtcctacttggatgattcgtaataacgattatttaaaacaggttacgtgtgatatgagcatgagcatgaacaataatatgatgcattttactacctctatgtccggcgtgttggcctagttatttctgttgcaaaatctatgttcttgtctgtctagatcaaaatatactagtatggtacgaagtagttggcttcgagtcatggtggtccgttgatcgtatgtcacaccaaaggaaagccattgaggtgaatatttggtttacaaaagaaatatgagaaacacgaattcaaggctgatggtctacggtgtttcattaggtgggggatagtaatcgatatagtttatactaagttactaaaataggggatttacaaatcactaagagaagatgggttgacacgccggtatgatgaaaagacactgtgatagcgtatgcccggcacgctcgagatgcccgatattatacgttgtaggccccaagtctccaaatcactcttccagagatatgaacggtgtccgtcgaagacattgtgcaaagaggaggtcgggtggtctgcgaacgacatcaataagcaccgacccatagcgcagttgggaaggcgggggtgatcgttgcttcatgttcgtatatgttggtatatgctcgcagggatagaaactgtttatgttagatggtcttttgttgactcgaggccgatgaaaaagtgtgtcgatgttgtgctggacccgttctccattgttgcacctctcccgatgaatgcagccggggaatcagatactcaatgctcgctgctagcagggacagcacctgtttctaggcgaaggataattctgttagaatgtggaattccagtatgtggaatggcttacaacaaaacaacatgcgaccaggatccagaccgcagagcaaaggcgtttggaagctcacatactaatgagtttctaaccggtttcatacgtcagtcatgcattggatgtcctccccatatgtatatgatgccaagtccaatgcattgataaaccttggaatactatgtagcgtgctgagtgttgtctacaaggtacggggcaatgttgtacaaagtaccgtcgagatcgatatctgatccaaaacaggtttttgactttcaatatacgaggggcatgcaacaaagaggatcgataataaatgtgtggatatagggttgtcgatgactgtcttgcccaggggcatcagggtaaggagctatgtacatatgacgtgaggcacttccggtagaatcgactaataagaatcgactagtgatatcatatgcttgctacggtgtacaagatacgttgtacgctaagcttccatcctctttgacctacatacaatacatcatagatcgccgtcaagaggctgtggtgtgatatcatttgagatacgctggggattgtcaaaccccggtatctgactcaagtaccgtttacattgatcggcggacagcaacaatgtatgttgtatgtattgttttccgaatcgggaaagtctgatctgagcctcgtcatatgtaatggtcttttgggttcatatctggtttaggtcttcagaccaggcacgagatggatcaggataatgaagaaagtggatcgtgaaaaggcattgattggcattcaataagcagaggaagacccgcaagtgcacaatgcataatcgcgcacgcttgtttttgacacgctccgctgttgatacaatccacatacattatccgatgctgtcatatctatgatcagccccttgaggtggaggagcggtgttatggatcaaactctattagactatattgtgaaacctacattgtactccacaagtgcctttcgacttgcgacatcgcatagaattggagtcaatccttatacacattatgtagtatcatagtttctccaccaattgtaacaatatctctctggatctgcatattgtagcatgataagctcagtatattacttgcattggtctagaccggtgctagctggattagactgcttcctcagaacaggtctagtttgaaaagtcagatagccgatcatgactgtaacggacaacataggttgtgtttcaaacgctcgtctgacgttgctgtatgtctcgtacatgaaacatatctcggggaaaaggagatctgatatgctgggtataggcctccgcttgccctaatatgtcagatatgtcagtctaggtttgtagtagtaggtagtgtgtcaccatcaagttgggcaaaatgtacaacatgatgctgaggcaaattatcgtgtatccggtgtcaagccgatcttgcaataatttgcctccccccctcccggctggcatcaacttccgtccagggttcatggatggcaaatccgtaccctcctccaccgttcttcggttacagatgatcctaccactggctcccacgtgtcgtaccgatcattcatgccaatatcatgtccttctagaacaatttcagactccaacaaggtggaacgaccctggtttccatatcggaacgcagtcggtcgcgagtttcggctccgactctattgataataggatcttttggttccagtaccgtgcttgagattcatctgccggaagtcagacttatttgcgattagacacaatatcgagtagagctgtggtcaatatacaaacataatatcatttgaagatgagggctccctgacgtcaggtgctattctgcctcaggcatcaacgctaaaattctcaaatcactagctcctctccacacgcccccatttctccctgttattttgtccatttctgatgataccgcggcgaataagacagtctgagaattaattaaaccttcatctgctgcaagctatgtctccactgtggctgaaagcctccatgcctttgatacgatgtaccagaccgttccggattcaagctcagttccgcttttgataatcgaaaaccagcctcgggtagtaactcctttcgtttgccaaatctacgaccggcgaatctccgccggccgaaatacaaacctaaatcgattgctcgggtcgccccgatgcctgggggtatgacggcatagctccgttcgacctgagcctcagctacgcaacggcacgcccctttttctcctgcggccacccgggactacttgatctatcggtttattttgagtcaatcgagggatccagggctctcgttactccgtactagaactacaccctgaattgcggcttttcaaccgcgtattgaccactttaccactcctgcgccgggtctccactagcgatgtccacattttccttcacaagaacaccctatcccgtagcgagacagaatgcaagatgggcctcgcccctcaaaagcccatgggaattcaattatgattcgtcctgcggacgtcaggcaaagatctgcaggggaccggactgtaattgtgccgatctaaaaccgccttcgcctctcactggtcatccacattccccagtgacctcatcggagaacggtgaccaatccataggtggaacaactgatgatatcgctcccaaagtgcaccagtctctgtgcacatgtggatattagttagttcagaacatcctctgatgatgatttgaccccacaccgtgctcctggacgtacccaataatcggtcgacgcggtcacttatgtacctcaaaaaaataagggctggggtttatggatgctcggtttatgatgcttgtgatgatgcttcttatgatgtcgcttaggagaaattatcctcccccctttcaccccccccccttttagctaattatgtcactgtactccgcttggtgtaatcggtagagatctcgtgcttaccatggatgaagcagaaattaggcaccctattggcctatcagaggcaaacataggtgcgtttgcatcaacaatccaccgatgtgatttcatatatataaaccttgctcgcagattggatccaattgttcttcgtatatgccctaactcctgaatctgccccatagcactttccccaaatatttcatgcgctggcccggacaacgtaccgtcggactttcaatttaacatcgcattatctttcctattcgcaatctttaggacctttactattcaactcaactgccaaacttggttagatcttgaaatattccacaggtgagtgaccttgaattgactggtaaataccatccggcttccccacggcacccctccacggggatcgtcccatacatcagccttatccccatgccgtcctatattatatagcacacagaccgtcatgatgccactgatcagcactgttagcgctgcctgatactttgtcttaagaacataagctgactcgttcactactagccattcttccaccatgactcactccgctcaaacgcaacaagcaaccgaagacatccactccatgttcccaactgctggcgtggacaacatggccagtgagactcatgttgaatcttaccggtcgcttgatccctctgccgcctcgctagaggactacaaccgctccatgctggaatacacccagcgccaaatgtcttccttcgtcgacacggataactctcgccgtgatagccggagcagcggcaagagtggccgtagcctcgcctctagcggcagcaacatgtcccgacaggccaatggacctctcacgcccatcagcaatgccgccccctccgccgagaacaagatcggtagccgtgacatggccgacgctaagtctgctgaatactagggctgttctctgtcaaggtatgcatttgcccccatcttggtgtctttgatccagaaatgctaacggacgtcttttcagcgtcctattccacagaccgtgatttaggatcataacgatacatggcattggcgagccgttgatggccttattgggccgtcggcggccacgtctaatttccgtcagtgcctacccaaatgcagaattttctgcggagttttatgagattcgtgcgggagagcgtgcctgctttcaagcgatatattgaattgtttatttttttctacattgatttctatttggcctcggcttgtctgggtcaattatgaaagcgccttttctttccccaacccctttttaccaactttttatttctgctcggcattttcaggatatccgttgactctcagcgtcgaagatgtcttgaatccctaccgtgacttttacctactcattcttgtcacctgtgacggctttggagttgctccttgaactgaaaagcagtttacaaacgatatttcatccccatttcgaaaatttctcgaacgctatccattctcctggggtctgggtatgtgatcaatgcttgatattccttctggaaaggaatattggcctgtacattacttgtacttgtacttcatccgagcgattctgtgctttttattctttttgattcgatgtgatgaaccaactttcaactataccctgttacgataccacctagccatgttggccattgatgacctgtacaattatgcacaatcgaaccggagcaatcttgtttttctgctatttgttggtgttttatttcctttctcctttcttcttctccattggctggatatagctcgtactgttgtagccccgcgtagtacaaggggttcgagtggtatgaaagaatactggctttggtaactagttcatttgtgttatttatcaagttatcgaatgggggctgaaccaaggcttatgatctgagacaatttgacgtcaccgcaacaatcccattgtggcttgaacgaaagatgcgtttatcgcgcctgctttgtaatcttcaatctatttttgcgcctttttcgggtttgtccggtatcttttctagttttttgttgcaatacatatgtaagcggcaagccaccggaatagaaggcgaagcaagcagaagaaggagaatatattttgaaggaggttttggacgagattggtgtcgatctgaatcaggcagttcgttaccaaacattgcaaagtggatttcatccacagtttggggaaacaccccaacaaccctcatactccagggaatgcttgacgggttaacatttgcggcttgcaggaagcgtcttgagcgagaagtattgtgggattggtggtacgcttcgaccagagtaaagagctttgtaagttctcgttgacatccacgaaatactacacccagcatcaatgagaatatcataataaatgcacgttgtgctcagaaacacaggaactgggaatccttcttcgctctgtgcatgtgctactgaatatttgttcctcatttccaaatcgaccttaaacacaggctattttgctcagactcgataatcgcggggtctcaagatataacgcattcccaggaaaattcttttttcaaattgaccaggttcagccttatcatagcctcgttcaagtttaattcggaagcaaactgtgctcaggtatgaagcatagagcattatgcacggaaggtggcctttgtgcgcactgaaaagagactagtcctaattaaaactcgtgcgcttcttatctagttgctatacctcccaaccgtgaaaacgtactgagatccgtcttaaatctccaccaagaagttgatgatgccactatctctgccactatatctaatagtgccattttcgatgtccatgcccatgaggatgcattcgagcatgagcgcctccagtttcccttgctatcttgttggtggacgtctgagggctggcagtctgactcgctacgaaagtcttgtccgagtatgatgagggatcagtagcagtaggaggtgctattacctcaccttcgagtatctcggcggcttgttctgtctcgtatatggcagaaagaggaaggtcctgctggagaacagagcgagctacctcacgctttagccactgagcagaaaagatctcggttggcagattttcgtctgacggcggagccctgtaattattgaaggcaggccagaagtagggacgcatgtacattctgttcaacgtttagattagcgtaaatgaactttgagtgaggtttagaacagggtaactaacggatcgtttggcattgcgcggaatccttgatctgagacagtggttgtttgtccccatgtgtaggttgctattaatcaagccgcatatcagtattaattgagagtgatgaatcggggaaatttgcaagtttcaagcttaccccagcatgaactatccctggtctgggaatcaaactgcaggccgattagcgccatttggctttccggtttagaatcgcataccccataatactgtataaagtgttcatcatctaacctcgcataattccggtggtctcctgcagggaaatcaccgaatttgacagtgatcggtggtgctggtttgccttgacgggctcggagggccgagcatgggacatatacggcggcgagccaagccccatagtcgcgacctagtagaatctatcagcatcaaagatgattttgaggaatttgctccggtaaacgataaagattaggagacatgacagacctaccatggagagcattagctgggccgttaatcaagcgcactacttgatatgcgtttctggctgactctaggaatgaggcaagagggaactcatctctggagatgtcactatgtcagtgtatcaagattcccagtttgacagactggctgagttttactgacacttcgcaagtatatctccccttgaaatttccttcttcaatctcctccttccaggcataccactgggctcctcttttctgattccaagtgtccttgaaggttctgcccggtcttctcggcgccttgtgatagacagtcttaccaccgagtcccttatcaatggcccatctttggttatcacagacctgtatttatttaagccgggttttagaatgagagaaaaggttatgaagaacagaaagtgggggacctggtcgggagacttacctcgtcaaagcccttgccatagctgcatgtgtaagtaacagaacagtcctcctgggcagttgtgctaaaagttgtcactgaatagtcaccaattgttgtaactgccgtcgccggcgctgcttcaatcgtcgtgatggtctttctaggaatgtctgtaactccggggccaacagctccctgaccgaacttggcagcagcatctgcgacgacaccatccgcaccggaccccttctcatgaacgatcacttcggttggtttgacgcacatgtcattgatttcctggtagtagttaaaactagactcagcaccccacatgttcgtgacatcagagccaatggcccacaccagtctagagcctgctcgaaaagtcagaaactaagaaggaacatctaccagattgaaggagagaaaaacgaaccaaatacagcgcctagcatgtcgataaaaccgagacacgtcgggtcttcggtagatgatgaaacgccgcgtttagcaattgatttctcattggaattcgacttttgagaaagccgggagcctcgcttggtcagaccatcttgcccgacgagattaagagaatcagtgtttgcataagacgatggaacgaagtctgaacagcagtatgactgtgatccgcctaaagagcaatttgggtcagcagtaagagcgaacaatcagctatttaacacttaccattgcatgttagattgtatatagctcccaagtccgagtcatcaacataggagttggctaagatttagagagttagagacccgaaatcaccataatcatcctacggttactctgattatatactcactattgatcgcaatgagatcggacccctcagggcaataacctgtaacacaaggcatgccaacaccacgccagccataccagtcgcatgtgcctgtgtttgtaccaggtgcgcagcatagtgtttggacatcatcaccgctgcaggttgtgtccagtgagattccagtgacttgacccttggcataggtctcgggtatgaagccaacggtgcattcctgaccacagaacgaccagtaacatgaattgcgattattagcaaccgcttgagcacttgcttgaagtgtcctgattttctcggcgtccgtggcagcgactccatttgttaccccaattcccaagaaatcattaccacttgtgtttgacgaactgtcctgatcaagggaccagatcatgatgccaccaaggcagagttcattcgccgctttcaccttcatttgcacggtctcgccatcatcgtacgagacccattgatttgagtcccaagtgatccatttaacagcagcctcattatccatagttggtgtgagaccattgctcgaaatgatgcgttgaatctcggcattggatagcgtacccgcagacttggtacactctccagctgttccaccgtagctaaaaacgcagcccggcgtattgcacgaaggatctttcaatgtaaaagaccttccataccagccaagacctaaattcaacatggaaggatcgatagcgttacgccaaagtagatccaggccaagtcgaacctcagtcaggttggtatgaggcttcacgtatggcccagtgaacttactggtcgagtcccaaacaccgtggatatcgtatgacatgaagttgaaaaagttcaccgatttagccatagcttttagatcaaaccaacgcatataccaatatgaggagggaagtgtcacactaataccatactggcctccaaatgcggatttcatatcactcaagaggagtgagaaattgtcagtgtcagcctcaactccacctcgatcctccgccgcggggtactaggtccggacagtcagccttgatttatctgatagagaacaattcgaggttttctgatagcgacttacctcccagtcaatgtccacgccatcaaagccataggtcctcatgaattgcatcagcgatgtaataaaagctttccgattagttgcggtggatgacatgtcactaaacgctgtttgcgtatttggcgaatttgtatcatcctaaaatccgatgagagattggctaataaatgtgagtcatattgacttacattgaaggcccagccaccgatagaaacccacgtctgtaaagatctagattcggtcatgagtcaaaaatacataagatggtcagtttggtgtgtcgggttcgcactcacggatttttctgtttgagggaagtgaactgcggataaaggtcgggatctccagcatccattggaatgatctcaaaactggtggggtggaagtagacaaaggcttttcgagcggaagttagacatctgtagcgatagaaaccgaagaactaatcgcgctatttaccgaaatttacatgagtcaaggcagtaacatccaggtcggatgggtatcgaatatcacagggtcgctgtgtcgccctagaacgtaatattagtataaatgagagatatctgggactttgagagatataaagggcatatctgcgtaccagctctcgtagtatccaattctccttttggttgcgcttgaccctgagcaagaaggctccttcacagcgccacaacttccgaacccagtctgacatttatcactacagaaatcctgaaggcagtatcagtaagatcgccgacacccttcggtaatagaaagcagacttacatcggtagttccgcagaatccaaactcagagcaacaaacgttcaaggggcaggaaaccgagcctccctctgaatactcgccgcattcagctttggcatcgcagttactgaggcaaacgtccgatccacactcatcaggagaataaccgcatacgccggtctttgacaagggttagctaggtggccatatactaaaacgaagacagttcagactgactcacattgctgcagcatgcgccattagagcatggtgttcctggtgcacaggtgccggttggtaatccattgtctgctcgcttgtgaaggctggagtcagaagaatttactggcagtagtgccctgaccattggatttgccgttcttccggtaacattctggtaacgaggtgttgactcttcatgcacttcaaacctggccttgtagatactactgccattctgtacttggcttgtagcacccgtcgtcaattgggataccagaagaagcccggctaggaacagggacgacttcaagccctgcatcatgaatgaaaaatctgaattgattttgagtggccttacagtaaatactgcctgggaataaagtataaaagatatacaaatgattgtcggaggagtctgcctccgagctgtggagacagaagatccatccaatttaacgaatacgaacgaaatttcgtccgatcgaatgtaaccaacccctgaaactttctaccaaaaatacaaactacgaagccatagtgtatatgggtggcggactctcggaaggtctgtgtagtacgagggtactatgtcaactagaattcattgccggttgtcgttggtccctaaaaaccctcgtagtccgtattttttgtatgttgtatgttgtagaaaattttcaggggctggttagtgcttgatttgagacatggagttgagctactactgcacgctaggaccatccggaacctcattttctggcggggccgtggccaccgtactatctcagagtttgaactaggaggatacggaacgcccggacgcccgacttcaatctcaaactcatttcgctgattaagtaaatgcattatacataactgtaaccgtcatgtgacctccgtgctgaggtacgaccagctagcttaagaatacatatcattagttatcttcccctaggctttcaggcctacaatctagattgttggtttgccgaacctaaaacaattatagctagagagaggcgaagctaagaccaagcttcacttggcgatagtgggttccatttccaccattctagtactagtggattttgggggccaaagcatagtgctttcggaattttatgaatattttggataaaagcccgactacaaagaccccttatttcgagatatgagatcaacaagaagaagagtgcattccaccgtacgactaagagaaagcatgctatcaaagttcggtttgattaccctcgggcttagtactactgtccatgctgggttcagggtctatgatggctttcctagtcaattgattcaagttgcttatggactcacggatcagtgtctgcaagctttgtgagactttctctatctataaatacacaatggtatttcagcggctgaacaaagaccagaaacacgacaattctttgcgacaaagctacagctagtaacgcaggtggaggaccggatagtgtgtgtgagtgttgtcttctgtcttgagtttgtgtttattttttttcagaaaattttctctgattttctttatgcttgaagattggacagaaaccaatttgaccaccctatgtacgactgaatgcagcaattcgctctcatcgtggtactccacggttgaggctaattgtgaaggtcagacggtctacagtaaaggcacgtatatgctcgcacaaacagtacctgcaatgtggaagagcgggcaaaatatggtatgcttgcaggacaggtaagtctgctcgcttggggcaacttcaacagctataactgacatggtactcggaacagcgcatctgactggtgctttttggagtcacagaaatggatcggtagtgactatgtccggtgagcttactataagccacctagaactacacgaataactcacaattagctaactagatggtcaccactcgcctgctacaatgaggatcaatcggctatcccagtacagtgctctgaccccacttggtctgttactgaaatcactgatgggatgaaagatgtcactcgtctttataacagcagcctggtactatcagattttctaggaaagaatcggcccttactgacaatgagaagctttgtagtgaatgctttatcaaaatttggcgccagcgtctgatgtcacccctactaccggacggtgcacatactcagtatctcctggaccagtatcagaatattcaacggaattgctcaacaaccttgccagtcactacctatggtacaactcttttggttacagctactaccactgtgactgcatccacacccgcggggacggtcaccgcaacagcgacttcgactacatgtatgggtcaactagtgcagccgtttgacacttatcgaccctgtttcaacatatctgacacttacaatgtcagcaccggggctgtcgtccgtgcgactaataacgagttctgtgaatatgattctcctatatgtctgcctcccccctgtgagattgatactgtgtggtataatcctacttggttagtatgattcttacccccaaaagaaaaagacacttgacgtgcatttgctgacgaaggagtcagtgaggaacttgcgcaaaaatactcaacggccagcaataatatcaccttgactcagttccttacttggaatgccaacattttaggatcctgtggattcttgaatgacgcgcagagaatttgcaaaaggtctggatgaaagcagataccacctttcttgcttggttatgctgactgatagatatggtttagtccgccaggaggacacttctctcccactggagttgtgtacgccccaactgcggctggctcctactattcaaccggtaagtctcgcatgctatataagccttcacaccatatatttttttataaatatctgatcgggatctctcttccacagcgaccgctgcagaaccaacacaatcgggaactaccgcgagttgtgggttgttctataatgttgtttcaggggatacagtgagtttgcggcgaccgcttcattatcatcatcctgctaattgttatagtgtaactctgtcgcacttcgtttgtatgcaaatggcactctcttggtttgatatagagattaatcctaatattagtggcataacattcgacgagcttcaaaacttgaatacctttgtgagtttttgtgatgaagtttctcttcggttttatctactaactaattcacttagttatggaataactgcaccaatctttggctggataattccatttgtgtcgcccccgtgacgacagcatctacatcgacaaacggagcctgtggtcctgcaaatggaaacacggtttgtgagggaacagacaggtatctcaactcattcatggtttgttcttatcgataactaacatttacggctttaatccattagttgctgttcgatcaatggctattgcggagccacatctgattactgcagtgcaggtaactgtatttccggggcctgtgagaccaccgtcgcaaccacgaacggtacctgtggtccttcttgggggggtactacttgcacaaatccaagctttgggtcgtaagtcgcccgctatcctaatttcaaaatgcacctcccagactaacatatctatagctgctgctcaatctatggctattgtggaagtgggtcggattactgcggtccaggaaaatgctactctggtaagtgcgatggtgcagacggtggattgagtatcaatggagaatgtggccctagctttataggtaacaagacctgtgttggcacgcaatttggcgattgctgctctactgctggttattgtggaagcacagaggattactgtggtaccggaaattgctatgccggtgcctgtctttgaaccttgttagtattcatagatcaataaagattgatctaagaatgtaacagccttcagtaggggtcctgaaccagttttattgccatagtaattaatacttagagcaaaatctcgatttatgtgcacttgaaatactctagatcttccatgctcttaagcatttcagaataggcccccgcttttcctacgatttgcatacttgcttgcttattgctgtttgtaactgtttgctagattgctaagcgagaaggttcgatgtttgcaatgtttgcaaatggtcagctatatcaacaggctgcttcccactttccaacttgcttctttcttcatcctcgttattttgtattgaatgtactcttctatcattgcaagaaatcgcatgccaagctgagagtatctaccacgggtgcagtgaaattccaattccacacttggtgaaacataccaatcaacaagctccacgttggaccctgcaataaaactctacttcctgatacagcttagcgttatagacaccctcggcccttgggcatatttatccagcaaagtcttcgctagtttgcaaaatccctcatttcggtgtccggggtattctatcctactgctagctgcactaatgccggagtcccaatttgacccggcactttctgccgagtttcacaacaaaattttggaacatgcatggacaggggccggaaatgacttggttacattgccttccactacttggtggcaaagttccgctcccgtcgaaattgattcccgtctggttccgaatctgtcctcgttcctacgcctggcgaaggtagttaattctaccccgccgggaccaggctccggtctctacttcttttattttttgcgcggtttacaggaacaaacgcgtttttttgattcctcaaccctcaaaacatggggtgatcgttttgtttggttatatccggctaccggggcggtcgatattgaggaagttggtatcatgtttgtgattgacttatcctattaatattttactatttcattctaactataagttagcttcgatcagagtacagaacttgcagctttttttcccgactgggaaagtctaatttgcgattgcgagaaatcatggcaatggagacctctacaggatatccttgcagtataccttcagatgatcgaagatagaaaggtatatacgtcttcaataccttcgaaattcttcccatggaatcttcaaaatttcaccaagtgtgatatcgaaaaagcagtggccgcttttattcgacttatcgacgctattgagcaaaaacttcctacatcgtcatcgccccagacccagatagatcttttatatcctaccacagtcctcgataaggcttatataaaagaggatacttttctccgatcatttcttctcgctcttccgcgtcgatatctttcgttccgatatatcgctcctgggattcaactccaatcgctgtcagatattacagatcagccttttcctaagcttttctctgatttaagtgataggatcgactataacgagaaggatacaattcctctacttctattcaggggtgagggagagagtatatccccttgggttggaccctggttccctgacggggaaccaaggtctatccctgctggcctttatatagaagatattcataaggatatagcgcaagactatggcaatcagtgtaagctacttttaccttttggtatcggtgcgaatggctatgcacgaagtagtaacggcctactacttggttattcttcgaatcctcctctacttaccgatgaagccgatcagctatatcaaattatctactactctgggcttctccctggatggagtcatggccagttcttggataagatattgacgagctgggcagagcgtgttgagttgggtgattgggtagtcacggaggatggcgtttctggagggatggaaaagtttaaggaggctgatacgtctcttcattgggagaagtactatactgcgatgtgttggtgatggcatgttgaaatgcaggttggctttccaaccgttttgggctcactttctgcactctgtgacgatctaccgacttgtgcctgccgacttgcgtacctgccgccacaacctggaacctcggccctcgcacctgccaagttcgcaccttatggtcgttctttcccgaatcggaagcgaggtgttttgcatggtttgcaacgagggaccgcacaaaaccgagtcgaagggatctgtagattgttttcctttctctttcttccttgtacttagaatcttgaatgaattgcactcctttcgaactggcatgtaacacactcaacttattgttgtatacggtccaatattattggaaccctcacaacataagcgagtttcccctttatgtatttaaggcctgcgaccattaacttgtagaccttgagacttttatacattccaattgcataccatacacttggcaagttggatcattcccttcttataatactctggttacatgcagtatccccctttgactaatgcgaccccccccccccccccccccccctcgcccccccccccccccccnnnnnnnnnnnnnnnnnnnnnnnnnnnnnnnnnnnnnnnnnnnnnnnnnnnnnnnnnnnnnnnnnnnnnnnnnnnnnnnnnnnnnnnnnnnnnnnnnnnnnnnnnnnnnnnnnnnnnnnnnnnnnnnnnnnnnnnnnnnnnnnnnnnnnnnnnnnnnnnnnnnnnnnnnnnnnnnnnnnnnnnnnnnnnnnnnnnnnnnnnnnnnnnnnnnnnnnnnnnnnnnnnnnnnnnnnnnnnnnnnnnnnnnnnnnnnnnnnnnnnnnnnnnnnnnnnnnnnnnnnnnnnnnnnnnnnnnnnnnnnnnnnnnnnnnnnnnnnnnnnnnnnnnnnnnnnnnnnnnnnnnnnnnnnnnnnnnnnnnnnnnnnnnnnnnnnnnnnnnnnnnnnnnnnnnnnnnnnnnnnnnnnnnnnnnnnnnncaaagccccccccccccccccccggctgcctgattttcatctcacctcaccgccctccatacaatttgtataggggattggtaatataaccccccttgaaataacccttcctgcctgaattatcgggcattatctatcaccgccttcctaatcaggtaccacatttcctacgctacctgctcaggtctaccactccgccttcttaggaaacccaggtacctgcactttgtatgtaagcccctaacaaaattaagtcgctctagatcaaagagattaattgttatgtgccaattcaaatcagaagaaagagtgcattttgaataagattctaaacgtagagaaagaaaggaaaagagaataaaatgcatgttattttactatatactactccataaagtttaaccatatggtagtctattttttctgccggttggattattctgccaaagttagccgatgacatttcaccgcattatttcttatgattttggagcccataggataaaaccccctggtcagatatgcactcacgaggttatgatttaattgcttcgcttcgctccgcaatcaagggattaaaacatgtaggtgtgagataaaatacgcgtttttttcgatcaaaatgtagggtttttaaaagtgtagaattaagtttagcagaattgaattgatgaacgcacccccttgcatacctccgaaggagaatctgatacactcacaagaagctgtcctcccaacgagttgtgccattgaatgtggaatgggttagttaaagatgctatcaatcattgccatgactatgttgttgtatgttccaattgactctgtgatatcgcagccaaaatagatatatttcccataatcaacagagtaccaggacccaagcccacataccacagcacgaactctcagaaagaccaataggaggaattgccgagcgttcacattccacatggttcagctcggcagcgaatcaaggccataccgtgcctttctgaacagagggatgaaacccctagaatctcggatagattgtgagccaaccaaaaccgcccaagggaggaaggcagaagaaactgcaatgatcctgtggagcagaaaagcgagaattgcatacactgaagttcaacatcgtgttcctgtttattcccctccgacacgcccatccgccaacatctgcgacaaccaaccggtccagctccagctccagccattcattttggtcttaattttggagacctgcacacactcctttaatccactgtctctaaaatcgactttcatttcggatattcaagtctcataaccctacgcgacgtggccagtcgttctacaatactattcatctactctatatttttcataccatcgcgacacaacatatacgaagagcaaaaaatcagcaacaatgcacctcacaactctcctcacgggccttgtatcccttctgtccatcgccactgccatcccaatggcaagcgagacaccaacttctacaacctccgtgggaaagtccctcatctcgccctcgagctctgcctcggcttcacccaccccctcgcccaacccttacgaggcttacacatgtcctccgggtaagttcaagtcttgctgcatgtctgtgcagcagacgggcaaggacattgtcaagtcgcttggcgagttagtgccagttctcggtggggtgcaagttagctcggctatagctttccagtgtatgttcctctctgtctctttaaatagccccgaaagcttgatcaatttatactaatccaatgtgccttcgcaggcaagaacatgactgaaatagaggctcctgatacctgcaccgggaaaggttataaccccatgtgctgcaatacccagaatgatgtatgtatctcatcctccgtttaattttcttgttctataagagaatttatctgactatccttttcttttagggtacctccttcaacacctgcaagcctttcgaggatgtgaagagggcttattattcgaaccagatgaaggatgttccagagtcacaggctgatatgatcatggacattctcacttaatgtcaaccatctggctagcccggaactctgtggcatggactgagcgccggataaactcttggggttgcatactgctaatcgaggagagagaaaaattgtgtctgtttgtttctttttacttctactcgatattatatggtcactttccttttgatagtttggttcatggagattacagtgtgtactgtacgctgttattttctacgttctattcatccccgcaggctctgtatacataactttagattgcttcatctaataagagcccgaatctcaccagattggattccatagctgtttatatatattatcctatctctacgcaaaatcagacatagccgagatatcaagttttctcctggaggtttcttcgtctgacacatctgacatatatggtcggttctcattgccatggtatatcgtcctgatatgtagttgtgtcaattaaaatatgtatacatgtactctgtggtactctgtggtagctactctgcttggtacctggaggaatagtaaaggtcacgtgcgataaagcttcgataagctcctaacatgaaattggagatctgcccacctggttctctcaacagatctatcgtgagatcgctgaccacgatggcgactcatggtgctgttatcctcaaggctgcatttgcagcttgtctcttacgcccggatcctacttcggttcctcgagatgagataaccgcgttccacatctcccttgagcgcgcgttgtcgcattgctccccagccaatattcaggtctgagccgttgtcaccgttgttaactgccaagtcccagcttactaaatacctacagacctgtaaagcctggttgcttcgatttgtcgcattttcatctaatagggtcgggggtctagtcaattacctggaagctcttgctgcgtctttctcaccatcccagcccactggatccaaactttcacccaagcgccaacgcctccacctactgtatttgatcaatgatctgttacatcattgcaagttccacctggacagcccttcaaccttctccacagtgagcgggtccctgcagctacatctcgtgaaattggtcggctacgcagcgagctgtgatcgccaaaagaacccacggcaccatcgacggctagatgagctgctagatatctggtctgagcaggaatattttcatgccgagttagtcgacaagcttcgggaagttgtggttatggggttgccgataagttccaacgatgcggccaacgaactaaacccagccaagaagcccggcaagaatgtgccctttgtcatgccatctacacacggagatccatcgacgcgctggcacgaagttcgtgcaggcaacatttatgcccacattattcccgactcgactatacccattcgacctgatgacacgaaaccgatacagttactagcaggtcctgccgatgcaaattcggtgggagccctcaaagcttttctcggtgatgtgaaccagctcttcgatccggaaacctctggggatgatagacatgcagacatcgaccagctgggccagacagtgatccggggtgagaacacaggcgacattctcgacggcgaacactaccacggatggtccctggaattctgtcaacccgcagatacagacaccgagcactcgcgcggccggagtcgcagccatagtggatcacgaactaataacaagcgccggcgctacagcgacagctctatcagccagtccgagtcacaatctccgagtggatcacgaccatacaaacatggtttccgtcgccacgaggcacgatcaagaagccgttctccacagcgctcacgaagccgcgaaagctcatacacacctcgggagccgtccacttcacacttcccgccacctcaccatcctcaacatcccccacccaccaactcctttccccctacccatatccctggacagtatgcccatcccatgggtcccaacaccggttatccccaagtacctgcacccaactacggttcttggcctccgcctcctccgcatatgccgaccatgcccttccccccacctggacccgggccctcttcgtcagccttccctcctccgtactatcctccaccttctatgccgcagggacagaaccaaggacagaaccagggacagcagcaggggtacgggatatctccgggtcagtatcacttccctcctccttattctgggggtcagcagggtggacccccggctcggcgccnnnnnnnnnnnnnnnnnnnnnnnnnnnnnnnnnnnnnnnnnnnnnnnnnnnnnnnnnnnnnnnnnnnnnnnnnnnnnnnnnnnnnnnnnnnnnnnnnnnnnnnnnnnnnnnnnnnnnnnnnnnnnnnnnnnnnnnnnnnnnnnnnnnnnnnnnnnnnnnnnnnnnnnnnnnnnnnnnnnnnnnnnnnnntggggaggagctcctccccagggcggccgtggctggcaataaacatgtgcacccctgaacatgctcgaaatgcaatcgattccaatgaactgagtcggtggaaaggcgacagccttccatgctgtggttgtcacaattacggccacaccgcagtgggtgtacttattataaactagataattgttgctgcatttcgagtatataagaccatattttactgttgaatattagctaggcttaacagttgtctatcagtttaccagatttccgatcttcagagtagagtctcggaagtgaattcccgtctatagccattttcccgcagttaacgcgtgaagtctattacggcgacctgcatgccacactaaaaaagattccccacacattttgcgacttgaaaccccgcgatggcgtatggcaatccgatatgagatggccattctattcggaggtgccgatcagccgttgcctaaagcatctgatcacggatgaggaatcccatcgaggatcaggccatagtcctgccccgcagtgtccggatcatttgcgcggttgtatggcctgactgctatgctaatcttcagcgttactttagttatataaagtctcttctatctttaaccctattttcttttcttcatatcctgtctacaccctgtctactctcaaaccaaaccaaatcaaaccaaactaaaccaaccaccatgtcttccatactcgccgcccaaattgtccgcccctccatccgccacttctcagcccaccgccctcgtcccgattcgcgcgctgcccgcgctgtcgccatgggttgcattatctccggcgtggtacttccatttgtcccccctgctttggaaagttcacgtcaacggagcttgggcatgtctacgagcgccaagtaagtcttgaatttctgccacgtacttttgcgagttggtgtggagaaactaacctgacatccaggaaccccccactttgcttccacgcgcgctagtcgccgcactcctgactcgcaactttgacaaggactgtcggtgcaggcgctgatacaggacactgcctccgagattgcgaatgtgatgcattatgccccaggagtttggaattggcgttttgaatttgctttttgactagcacaagggatggtgctattattatacattattactattgaagagagagggagtggagatggcttgatttctctctatcgctgcgactagcaaggatcattgcatagctaactttgcgcgaatggatccattactgaattgactcgagctcgagtacgtagtacgagaaacgaaccaaatgtagcccaaagtagatcgagtccgaggaaccccctcacctccttattatctatccactttgttccacactcctctattttcagttggcgacggagtgatccgtgtcaaaatagtatacaaggcggccagccgatcagctaaaccggttcccactcggaggccgatacggctgttccgtttcgtatttccccttctccatgacgcggtcgatcgccgtcatgggttcatgccgggtaggcgctggatcgtgagaagcttcagtacttggagaggcggcatcgtcggcatcatcggagttcttgaatcgtcccttactcgctcgcttcgagctagtgtcgttggccgggggcggtgtcgacgcttgtgctttgcgcttatgctcgttctccatttgcttcatttgggccttgcgcttgatttcggcttcaaatcgggattgtcggtcggcgttgatcgattgcttggcgaaatagtaggctccgccgccggctacgggggatggttagttttttacatgggaatctctgggattgtcactggtccttggccagagatggatcgatatcacataccaaggcaaagggtgccccagcccatcctgtttaggtgagatcatcagtaattacgttccggtttgtttggattttcttctttcagatagtgaaatcttcgctcaccaggtagatcgaacctagagatgacatattagtaagggtaaagaggcattgggtagaggtactcaccgtattcatggtgaatgctttggtggtgatatgtgaagcagcagaaaaaggatctctacgtcaggcccgaggtcgggcggctacccgtggacgcccggacgagctcaccgcccggcctgatgactgtaatcggtgcctcaggccaagggttatcaaccatcgcatcgtctttggagaacgcgattaaagacgacctttgtcttgatcttcttctccatcgtatatatactgtcactctagttgatatcccactgtctttcacccactcctttcaccaaccctatcctgttattttacaataaaccggagaacctcacttcgccgcctgttcatccggcgcagtatcgttccatgctggcgtgaaataccttttaactggggcgtcgctccgcctcactggtgactcactccctgagctactattgatcagaattctcacgctgtttgtttcctgaacaaagtccaaacatgcctcccaaacgcaaagcagccgacagtaagtcctggtacacatctccgaagtattgatggctgattatatccagctggtcggtctagcggtgcttcaaagcgggctacgccggtccccgatatttccagcgacgatgactactcggaccaggaagagttgccagatgaaaccaacttgaaaggtacagtgtggcagtctgctcacctgaagtgaaccagagactaaaatttgaccataaagcggtcgtcaacaagttctctctcgaggcgttcagcaagaagaatcatgcggagaagacggacccccgatttggatacaaggatctttcttcgctcccgctgaagcgcgaccactacaaccggccgttatggatcgagcctttgaaaggcacaatcacactcgagagtttctccccgctggcaccccaggcgcaagatttcctgaccaccattgcggaaccgctttcccgtccgacccatctccacgaatatcggttgaccggacacagtttgtatgccgcggtctcggtcggtctcaaaccgcaggatattgttgagttcttggaccgcctgtcgaaaacaccgctgcccgaaagcattcggacgttcatcatcgagtttacaaagtcctacggaaagatcaagatggtgttgaggcataatcgatactatgtggaaacgacagatcctgaaatgcttcagcggttgctgaaagatgaagtgatcggtccccagagaatggataataccgaaggaattatcgaacgggctgctccgaaaatgggtggtcttgtcattcctggaacgaaagatgcagctggtgtacgagagaccactcaacaggaggctgccgctgccgtagctagagatgggaccgaagaaggaggggccgtgaactatggcattgacgacattggtgaagatgatacagaagaagcaaccacatacagtttcgaaatccccgctgctggtgtcgaagtggtcaaggcccgctgccaatcgatcggatgtcctgccctggaagagtacgatttccaaggagacacagtcaaccctaatctggatatggatttgaaacccgcggcgcggattcggtcttaccaggagaagagtttaagtaaaatgttcggtaacggacgagccaagagtggtatcattgtgcttccttgtggtgccggtaaaacccttgtgggtatcactgcggcggcgaccatcaagaaaggcactatcgtcctctgcaccagttccatgtctgtggttcagtggcgaaacgagttcttgcggtggacaaccatcgaccctggtgatattgccattttcacgtcggaccataaagaaaaattcaagcgatcaactggtattattgtgtccacatactcaatggtgtcacagactcgtgcccggtcctatgatgcccagaagatgatggactggcttcaatcgagagaatggggtatgatgattcttgatgaggtgcacgtcgtgccggcatcgatgttccgaaaggtcacatctgcaattgccgcacagagtaagcttggtctcactgcaacactactacgtgaggatgacaagatcaaggatttgaatttcttgatcggaccgaagctctacgaagcaaactggatggaactggctgcacagggccacatcgccaaggtccaatgtgccgaggtgtggtgcccgatgacaactgagttctattctgagtatctgcgggaaagctcaaggaaacaggctctactatacatcatgaaccctcgcaagttccaagcgtgtcagttcctgatcgatttccacgagaagcgcggcgataagatcatcgtattctctgacaatgtctacgctctcgagcgatatgcactcaagctgaacaaggcttatatctatggcggaactcctcaaaatgagcgcatgcgtattctagagaacttccaacacaatgagcaggtcaacaccatcttcttgtcgaagattggtgatacctccctcgatctacccgaggccacttgtctgatccaaatttcgtctcattacggttcgcgtcgtcaggaggcacagcgcctgggacgaattctgcgagccaagcgccgaaacgacgagggcttcaatgcgttcttctactcgctcgtgtccaaggacactaatgagatggtctattcggccaaacgccaggcattcctaatcgatcagggttatgctttcaaggtcatcacccatctccaaggcatagacagctatgaaggactctcgtactcgacgccagcggaacgccgcgagctcctgcaagaagtcatgctgcagaacgagtcatccgccgacgtcgaacaggtcaatgatgatctgttctcgatgcgctccggcaagcgagtgacatctaagaaaggcggtgctaaacgcagcgctgccactcttagtggtctggctggtggtgatgatatggcctatatcgagtataacaagagcaggaacaagcagctcaaggataagggacatcacccgctgttcaagaagatggaacgagaccgacaacgccgcaagaaggagagggagaacgaagaataaaagctgaaatgcgctgctgtttttgctttcctttttcaggcgcgtagtttttgacctttcttcttgtatgcacccagaatgacagataccccaaataatcaccatcagtatatggtaaaaaatgaacggcaagttaaaaagatcatttgtgtcgtagaacaccctcgtccagaaactcttgtaatcctgaaataaatatgtcagcacgaccggtctagaaatcatcgccaggcctagggctgctgaccgtttcccatgacgttggtcgtcgcaacggaaaacccgaaatcgggcaatttctccgatttttgtgtttggagttaataattgtacgaccctgataggctccattggtgacttggatttcttatggcactgtctagatcaccctgacagttggacagctccaatcatcactagtatacacggaccggatggtttgagctatataaatgacatgcttccccgcgttcttcagtgtcacagacgtcatttctccaaatcaagacttataactacaaacaagtcttggcttctcttgcggaatagtattcgctgctattccagtttgcgtctaccatttcaaacagcctgctcgacttcgacgtcttcacctactctaccccttccgcgactcggcgcgcagtacagctcgtatagtcccaacaccgggaactttccccgcgttactccatccagaatggccactgctactaagatacatctgtcgccggcgacagactccggaatctacagcttcaatgtgagggaagacaccgcgcggacagtgagcgagctcttgcaggaagatctggaaatccaccatgtcttctttaataacgaacggttccatagtatgtacttcccaggcgaagccctcaccaagaatcctatctaatgcaaagacagatcacataccccacgagctccttactatctatgctcttggtgcatcaccggaggaggtcaagacttgctatgaccggaataagcgttatcagagacccgcccttccggcaaaccaagatattgtccagtctatgcatgatgtcgctaaattcaaggagtgctctgggaaggaagaaaattaccctcattacctagctttcttccagcaggagattgacgcaaaaggcgtcccagatgttctgaatgagtatttattcgctgaagatgagcgagcggagagtatgatgtgtcgtgtgtttgccggtaagtatatcttacagttgtactgggctatattatattgtatgttcctcgggctaattcattcaggcctcattcacccgttcatccaactcggtttcgggattgaattcaaccaacctgctattgtagcccaaggtcttgctcagatagcagtgcacgatgactggctgggtcgtgcctatttcctacccgcggagaagatggctggcggcatcggaaagccgggacagaagtcgctgttccagctcataaatgagattcgggcagacaagacccttgttgagagtgttcagtggtctgacagtaataagataaaagatggagtgctccacagagcgcctgagcagatgttgaagtatgcttctcaatttactgtatccaaggatcaggtgcatgggcggttagcggatatgaccaatacagtcggtaagtctagtcttggaagcgcttgcttgtgttatttgaatgatgcgagcgagaagctattgctgaattcatctcgtcagtctactataccagtgccgcccagcgtccgaccaaagagatgtggcttgatttcttcttgatccattgtgtcaattcctctatcttcttttctaagattatcgaactccctttcatgactcagcgatccaaactgcgcatgctggaatggaagggacgaatcgagctgctgatgtatacttcgcgtggaacgccggatctcctcctggatgaggtggccaattattccccgaaggacaactggtcacagttattcgcgcgtagcatcgcccatcccgatgacgatggacatctagccaagctggtgcgggctttggcgcacggccagaaagtctgccaggtatatgagagaacacatcccgagatgcggatcaagggaaatatgtggcttagcgttgggaatataggtgagtatcaaaatctccattacatatctgtcaccttacctaactgctcgacagccgttgactctactgtcgaggagggaggtagaccaatgtgggtccgttctactggattcgatgaagcatgggagtctcaacgggcgcatatctgagacgggcaacacgccttcttcatgaggatatttatttcattgtactttccactatcccccagaatgttaccatttaacgctaaattgatataaaacttccccatactttagaggttgaactatggttcccggctctagctgcagtggggctctaaccttggaatgacgccagcggctcaacgtgattgtgcttgtatagggtgcatatgtagtatgttcgaacggttttcaagctgaattgaaccggaatgggagaagaacggagagtatcatttcttgcaaaggccagacacaggaatagggagaatcgtgtgtagaaaacgaaagaacgaaggcaaaaacattggggatcacgtggtgtcaagtggggctccccaacatgtattcgattctgcatctcctcactttcccccccatcagtctaccgaggtagaatctattgttattctccgatcttaacataatcatgggcaacgaagacagcaaggacgcatcaacccagaagaactggactgatgatgagaccaacccgttcgttgccttccggcgctacgctgatgagcaggtctccaccatgctgcaatctatcacgggcctcccttcgatggtgacacagcctcaccacggccactgggatatatttgaggataatcacgactataagagtcggatggctcgtcaacgaaacagtgataatacgggcagcaacaattatccaacagaacgagacagcggaagtggttatccggatggagatgatctacgcaactatggaaagaatgcacgaccacgccaaccagagaacgatgatctgtggaagaaatggtctaatggaccatccgagctgtttggcctcgattctttcttcgaccggttcttcgaggaccgcttcttccctttcgcatcgcaactcctacactccggccagagccttctcctccgggatatgtttgaggacaccgaatctccaacctggccgattgggtatatcctgttcagcccatactcgcctctccatctagaacgtcaagcacagtaccaagcaaaccgtgagaagggcgttttctcttctatcatgtcgtctttgcatctcaactccgaccgtgacccctccgaaccacagtggcgagaagccttcgaggatttaatccgactcgagaacgacaaatcgatgctcgatcgtaatgccgtcaccgcaccagagtctggaaaggattggctacaagggcttattaaacgaggcagcttgggagataagtggaagtatgttcctggcagagatggccagccttggtcgggcattacgttctctagccgtgcaggcccagaacaggaccagtctcggtctcggtctctaccggagaaagagaaagaagccgtcgatacgaaggaggctgacagcgagctggagctgtatgagcgcttcttgcacgatattgaaaatcgcgaacgcgagttcttccgcggggtttccgaaagccctcttctgcgtctcctactcgaggaccgacggcgacaacaggaggaacttgagaaatacagacgcagcgctccaaaggtcgaagatgagcacagcagtgacgataatgagaattggatcgatcttgtgtctggcggaaacaagaaatcagttcctgaaacacccgaggatttgccgaccgagatccagaccaagccaacaccaaccgaagctgtctcggaaccagcgcagcctcgtatcatctctactataactcgaacggaacgtgtccagcttgctgatggctcggttcagagcaagatcgttaataccaggcgttttgcagatggccgagaggaaagtgacgagtctgttgaggtgtctcatccccagaaaggttccaagtctgactctgacacaccgaagaacggttggttctggaaagactaggactctgtttggacaatatctacgattttaaaatgaccttctctcatgtcttaactcttcagcgttcgttctctcaatctattcttttttatctctttcaatttgcttcccaacctgcttctcggctatgcatggaaaagtcaatcccatctagtttgatatctcttaggaaataatgcaagcatggcggctaccgtcggtcataattcaatttctctatgagactaatatcaagcaaatctaagccaagtacactaagcatcttcagaattttaaaacccactcgatctacgtctaatcagccttgacactcttcttccctcccttgccagtagtccaccccctagattcccagagtttgacgttatcttccatcttcttgtaagcccaagtaaacggcgggtctacacaaccaaagttagcacctgccacaaagccaataatgagaaaacatacaaaggaactgtctcaaatcatgacgattatcctcgggggagtactgctcagcgtggtagctaggcgtgagaacagtcatcttatgtctgttgatggagtagtagtagaagaagtggcgggtcttctcgtagatctcgcgcgggctgtactcgttgccccacatgcgaagcagcttttcgtacatagagtacgggcctagcttggagaccttcctcaagtacccgaaaacgcccagctgcacgtacgtaacgcccatgtcggcttcgtcggattgcacgtagtcgtgcgagatgggttccagctcggctgtgggtgttgcgtggatgaattcttcgaggatcgggaggtcgaagctttgaccggaccaggcgatgaatttcttaaggtcgactttgcttatggagccgatgggattgagctgttgttttggttagtctggtataaagtggggttgaacttgcgggaattgatgcttacgtcggcggagctggcatcgtacttggtgagatagcctcgcaaactatatgggtttagtcagtcaccagaaaggaaattagtgtatttatgtggcgtaccattctgtaatagcagttagtgaagatgctcaacaaggtgcaatattcgggtgagagacttaccatcaacgttagaggatgcaagaacgagcaagccaccacctccagggcgttgacgcacagtcggcaataaagaggcaaacagatatgagagaaccattctcatccgagcctgcacattctgaagcgcggcattctctgcgaaagatccaccgtgcattttgaaacgaggctggaagttagtgataacagtaaagagattcatgatagaagtgaccacagtatcgaaattgaagtcaatgtggtaagacccaatatcggaggccagccgagatgctctgtctcgtgtctccttgcctgagttttgggtgcccatgtagctggtatggaagatagacctagagaaattggttaatgttgccccagactagataattttggcctaaagaatgatcacttggaaaacttacttgcaaatttcttggctggtggtaggaagccaatctgagtcttctggcttcgcacacaaccggcggacatctttgatgacctgctggttcccttggcgcactgctttgagcacttcgcgagtcatggagtgcacaatgattgccgtggcacagctgtcaataccaccgctcagagggaggaagaaaccggcggctccagatctccgaaggtaatcccatagccagcaggcaggccccagagcaatctcctcctcggcaggatggtaccgcggatggataggcagagcaggcgcgaggttaggttcggcatcttcatcccggtgagacagcctgatatcaagatcaaggcggacaaagggcgattgcttgctggcttgcattccacggcttgcgctgcaccggtaggtgcggacttcttcgatgtcgaccgttgcagtgacaacttccacatcgttcagagagaactgtgaaccttgggccacgatgtcaccgttgacgacaatcatagcacatccgtcatagtacagacgatcgccatcgcagccttgttgattggcgtaaagatagattccaccactctgtgagctgtaagaaaagtgctatgctattggagcgttgtttttcactcaccagtttggtagcctgggtgatcagattgacccgagtgttaagcttcttcagttcgtggtggctgcccgaagaattcgagatgatctcaacacctattttgaattagacaatgagcgcggccatggatattgatacttaccagctaggccatacgggatgtgagggctaaaatcgattgttagcatccacatccacttagagagttcaacacctacccattaggggtaaacagctcctcacacgtctcaagacccagacacgtatctcttgtgctgataacagcatcaccaaatggaaccttgtactggcctgtgatatctccaactattgattccaaatagtagtcatccacctcctgtggacgttgccatggcgtaaagtggcggtgctcgcgatagttgccatctagattagggattgatattagaaactattctccgaagtataaagagcaattgaacgaaccgttcgcaagccacatcttcggcctaatcaggataatcttccggttgtggaaaatgacacttgagaaaatatatcaactaatgctatatcagtaatatcgggaatacttaccgacagttgtagcgcacattgcgatggcgaaccggcaatcccacatcaaccacaatatcctggcaatcgggatggtcgatgatgcgggcgaacatttcccatgcgtgcatgaaggtgtcgccctcaaggaaaccgtccagaactccatatccggtaatctcgagctccggtccaacacgcaaggtagcaccggcagccttggcttgcctgatgctctcaatgatacgctccgcgttgccctcgaagtcgagagcccactggttaagagagctagaacgggttagcgcgggacttcctagtatcaaaatagtgaatgtgtcagccttaccatgttgctagagtgactaggtgccccatgattcctaatatgactgagacgtctgtgtcttgtgctttgcacagaggctcaccggcgataagagccgaaagaatgaggtcacgtgtgtggggagctcagattcccccgcttctgtggtaattacatgactgtacattattgtaatctattcttctctcagcactgtcggcttaactccgaccaaaaaaacatgtaatcagtttgtaagcatcccgaggtcggctgctgattaatgcgatttctccgcctgtctgtgctggattccacgttttgatattttagatatagactcgttattgagtgagaattttcttcttgttcatatacttaccattttagacattccttgctggcgatttggctcttacagaatgagcacgactgccctgatccccgccccggctcatacgctcgcggattcaatgttgtcccgacactttggcaaagagacggttaattacttctccagtaaggatgtcttagactcttgtatatgaggcacagtagggctaaagtatctctaggttctccaatcaatcgtctatctttcttgcgctccgaccacccgttcctgtccagtgctctaaagcacccttcgacccgatttgtactgttgaacaacctagcgcccttgactccgtcaccgtcgcagctatactatgccaagtatgacgatgtacgcaagcttgttccccaggatatcttcgataaatccgaggaagacatgatcaagaactatgactcgcgcaagacacacccgacccttatattcctcggactggacgagagtcacaaggaagggggtctgacgtacaagatctactctggcacgccgtattttgcagtcgacgtgacccccaagggacctgaagagcagcagactgcagcgaaggatataatcgctgccatggaggcgaagggactgtcattcttccaaacacgagttgtcatgtccttctccgcagatgaaggtatgaagatgcgatcttaatgtctgcatctataagaggaaactaatcaactcgggatagctgctatctatgcacaagcacgtgcgctgatggactggaacactcgcaacaccttctgtggtacatgcggccaccgtactttggccgtgaatgcaggaaccaagcgtgcctgtccaccgacggatgttgcactaggaattgagggcaagttggaagagcggccggagtgcaatacccgcactacgctgtcaaacctttccttcccccgtaccgatccgactatcattgttgcggtggtctccgctgatggcaagcgggtcctcctcgggcgctccaagcgcttcccgccagggtggtattccaccttggctggattcatcgagccagcggagtcaatcgaggatgccgtgcggagagaggtgtgggaagaatccggcgtcactttgtcccgcgttgttatccactcctcgcagccttggccgtatccggccaatttgatgattggtgctattgcccaggtcagtgaccccgctcacgagaccatctctttactgcatgaccctgagttggaggatgcgcggtggtttgaaattgaggaggtgcaagaggcgctgcgcattggtacaagtgacttgagtggtccggctggtccagaatacaagggcggtttgcgattgccccctcctacggctattgccaatcagttgattcaggctgctgtcagcgcagagtattttgcggcagataagcagtctaagatgtaaactcatacttcttatgaccaccatatataacattgatgaatttagaccttgaccatgtctgaacaccggtagtatctatgtaaaagccctgttttgaattgaaaggctcacacggaatatatcctaattctaagtaaatatttgcttcgatgattccacaccttccaagctttcgaaattactatcatattgtatttgggaaaagacttcatgcatccatcatgagccgaaggaaaacaaatatgtttcatcaaacttccctttgacgatatcaacagcctattgatgagcattagaaaaacagttcactatgtgtggactgtcagcgggcttactatggcatctttgaattccatgacaattgcttcttcctcattgatgaggtcatcttctcgcacggtaatatggtctttatcgtatgtctccgctcgatcaaaatctagccaaacgactctctgcgtctgaactatccttgacgatcatcatgttccgtggttttgaatctcgatgtctcactagtactttatgtatttggcgaataccctttaggagattgttcacccgttgcggcgtgtaatttcgcaagttgatcatccccagactggtgatgtactcgaggaatatagcgctaggcgggtattcgtcgtcgagaaacttccttaagtgaggctggcataggctagggtcaaacttcctcataaaacctaggaagtctggcacaattccacgatcacaaagtccttgctctttcagccgagtgtaggtagtggcttcaagtacgtgaatatccaatccacgaccttcctgttcgtaatagcgccgcggtcccctcccatggtgctacttatattagcaagaatatctagatgcatagtaccttgttgctcgacttaccaccttcatgatgcaagtttattgccggatctcaacgaaaaatatgactgaacatcatcaagctccggcatggtctcaggtagaaatctgtttttttttgaaggtagttggagttgtttgcagagagcattacagggaattgtaggtgacttggccccagtattatgcacgccccagcgtttgatgcgctaactcagaagcaccaatcactccacactcttatccatctggcaagtggttgctaagtatcaaaatcaaagatatctactattcacttgatttgctgtagctcttgcagattgatgtttaccctatctgaaacaaaaaactccttctaggaaagattgtatattgtatattctaccttcttacggttctcggatgggcgctctagcgattcgcagaggaaatgatatgatcatttcttgatgttgaggaagggatgcgcgattaattgacgagcggttttcctctcctctgggagccaggtaagcattccacggacaaaagacagaaaagaatctcgctcattctcttctagagatgggagtgtagcttctagacttcgggcaggaatcaagtcatcgtagaggaattttcctaggcatattagcgaaaaggaagacaaatttcacttgtatgattaactacaaaccttcgtcactgaagaaaggtccatcaaagtattctcgtgcattgctgcaggaaataccggcttcattactgataggatgaggccaattgtgctgtgccatggcattttccttcgcaattaatttctccggaggaggaccgagaagcgcgatcatttccgctagatgtgacttggagtcgtatcgaccatccgtattatggacttgctgaaatagctctgtgcattcaataatattccacatctgatttgagggataagccttgttcgtgatactcagacagagaaagaatcgggggagacgttaccatgacaccaaaattccaaatatctgccttagaatcccaaccacagccaagaattacctccggtgcacggtagtggtcaggctgtatgggatatatgccagtttggtcccctccggcctcttttctcggagaatcatagcttagacgtgtcgataatccaaagtcagctattttgggtaccatattcttaaggtttgtccaatcaagagccccaaaatcattgtggcagcgataaacggtacgaccggtcattatgtcgactttgtattgcataggtacttcgttgatctgtagtttaacaaatgcggaaagaacactttcattttcaaaactcataagaatattatctagtttcaaatctaagatgatttcattaaattagttctttatatcataaaaaatggaaaggaaatggtactcaccagtatgaacgactccacaatcagaatgaagaaagtcgaggccaaccaggaggaaaaatatgtaagcttttacgatcggtagagggagtctccgatcaacgaaacgtcgttgtagaatccagagaggctcgcgcattggtttataggctaagcataggtggtttccttctgtactagccacctcgaaactctccagacaggttcgcacgatggcgcggccgcgatgagattgattctgccgtgtaatgtgctcctcaatgtctctttcatggtaaggctcgcgatcacggcaggagtttattatttttagggcgactgttcgttctgactgccatcgaagtcttcatcaattagttatgtgataagagggcaaaagtggaacggcaagagatagattagcgtaccttgtgatatctcgagctagccagactgttgatcgagttccccaaccaatcttcaccagtaattgataatgactagcaagaatgtccccggggtttgccgagtaaaagtgattggggctgtatccgggacagatctcctcatccacagcttcatgctgtggaatggggagtgcggacctggaaggcagatgccagatcggctttctcgcgagggagaagattgtgcgcttcgccaattgattcattgtttctagagataaattgagagacgttcacatctcatcaagacgtgctgcgaataggaccttgatatatactgggccaaggatatctgcacctgcctagttagttaacttggtggctggcaagttgtgatgactaatcaggttattttcttggaaggttccactctgagagagttaaggtgtgctccactaaatgtctatattgtggattctctacggagtaggtacgctccgaggatgatcatatttaactacggagtagtatatgtctcttagttacaaatccatttactccagccaatcatgcaacttgttactcgactgtgattttcggagtttttgggatgatcctagttatcaaaggaaggacacggggttgggcagagatttaagggaacgttgggaagagagcacgtgaatcgttgatcccactaccccgtcaacagtgggacattcctaatttgtactacatacagcatagacagtaggtatgtcgctttgaagtttaggcatctgaactggtctggcggggaggagtccttaaagatcatgcatcatgcatcttgcactgctgtgattactcgactccatgtatgcagaaactgccgtaattttgcttcatgggcccgagtttacgagactgcgtgaatttgaatacacaggcgggctctccaaggtgtgatcttcaataaacggcggagtacccccgaagccatttgcatcatgaaaaaatgccacatctttattgatcctttcgcgtgttcccggatgaggtttgtaagcaactttcctgcggctgagatgggccacgacgactggcagtttgttctgttcggcaagatggcccagtgtgggatcccaataattgttggatatatcgaatatgaaaagtgtgcagactcgccatttctgtatcgctaacagccttgtatccggtgtatcgtcttcttgcacatcgtaatctgcgtattttcgctgcttttctagtgaggatataatgaaatagaatgcagaggaagtttgagaaatatatacccaccgctttcgcttctcataccgctttggtagtggtatgagacgtatacatttgacgacgcggtgtaacaaacttccaagagcacatacagttgcctgaaggtttcgaggagcctacctgggtaggtgttccgactctgctgattcttgcaaagtctgaagcaggccccactgttcagccgcatttcagccctcccagttgagcctcatcccgtaccagcaaatgaacctgtagtgtccgacatagcagatcaagaaaacaaactaaataacaaggaaaccatctatatagaagtttatcctttatctagtaggtactagccatggccttttgcgggcttctagtcgcgatcacaacgagaatgtcgctgctgcaatgtcaatggctattcgggatatggcgtcatcttcagacctcgctactacgactggccaggcaagaacgaacagaacacacgtttccatctattggcagtaagtcataattattccggtaccggtaaggctattgggacttgtcacattatcagaaccacttggaaaacccagaaagctatgattccccctttaaagaatgagattttgccacatgatgatcggaacgagaaagccaagagatagagaacgggggtggaagactgcgaatcccttgatcgttcatatgtattcttttgttttactcggtaggtacaggtgaattgtaacagagacaccacacaagaatcaagattttaagacgaccatttcaaatattggcatacaacgtgccatcccgtaattcgtgaacactgctgttccgactgtttggggacccgacctccgtataacgagtgccatcacgcagttcatggatcgtgattcttcgagtgctcttgcgcttgcgctgcgagcctcgcttagaatctggggtccctgactcacttcgcacttgactgcctggtgtcatatcgcgctcctctctgtctctctcaatagctgcctggagcatatggtccgcaaccctagccgagccaatttcatcgtaccatcgacgtaagccagacgcgtacgcacgttcctgcgagtcatattcgacaggaggtccgttcgtctcggcctcgggacccgaaccgtcgaatactgcccacgcgctagtatcggcactgacaagcatcatggtgtgatcgaaactctggaccttgaagtcgcgtaagagtatggcgttgccttctaccaatgttggcatcgaggccttgtggcgccggaaaatttgagcatgaagagtcatgccagccatagatggatcggtaagttcaatagtcacgaaccagtcttttgaactagatttggcccgggttatcggcgaagcttcatgtacgattgagatggtatcgactagagcattgtaatgatcaatgagtgtggcaagtggtgcgaagtaggaaagcttgctccgcagtccagaagcattacggtcgggaactgagggctgtggaatgggaactgccaatgtgttcggagattcaatcacaacatccatagagcggccaggttcgggtgttgctgtgggttctgcggcttcaacggattccgaaggagccacggcatcatcatgtctgtcaacgtggatctcttgtgtgttttttatgagtcccgccccgatgccatcgtcttggtctgactctggggagtcagccagcagcaaagttttatcaagaccagtaggggcttcagtttcttcgatcgtggatgaagcttgatgttcaaaatcatgaatcagttcaagcggggatgcatttttctgggtggggtctgatgttgagggttgtcgcttcaatggagacgtagtggacggcgagactcgaccgccaagtggctcaggtccttcgacagttggctcttcgacagtcggctcatgcttcaacgggaaatcggctatggtatttctagcagacgaaggaatatgcaaatcaaattgtccgtccccagtgagatactgcccagcatgatttttgccttccaaggatggaccttgatgatgagattcaggcccatcaagcaagtttggatcagcattgcctgattgcccctcgttatagtctcgatcgactggcactcctatctgtgcgtgagggttggccacagtataatattcgtcgttgtcagcttcttcgatgagctccgcatgtttaatttgtttatcttcatcttgctcaaggttgggtgatgccacttcagatgcacggtccgtttcatagtggtcttgggacgactcatcatcatccatatcactttcgtaaactcggtcatattgttgattgtattcgtcttccccctcttcctcatcttccctgtcttccctgtcttccctcgcttccctgtcttcgctttctccaccgtattcactcctttcaatgtcttcgctctcttcactgtcttcgctttggcgttcatcagtatcggaatcgtcttccactactccgtgatagtcttttccgtcaagataccacggctctggatattcctgtacaccacttgcaaattcggctgcagctggagggacagcgggatgttcggattcagagcagtatgagtgatcgtttcgttctgctgactgcgaagctgaggctaccggatgattggaggcagactcatcatcactgtcactgtccagcacgattacttcatggcttcccgcctgcgagggcagcttttgttcctgctcaggcttttcaccactagattcaacgacaccgaagtcatcttcgtccaatcgtgattccaaactaggatcaccatataaatcctcctcgtcctcttcagattcacattgagaatcgtaattttccactgactccgcatagtacacttcttcgtccttttcttcccggtatccttgactgggtggacgatcgacatccttttcgctttctttctcctcttctgtatttttcatcttttggtattcctcatctcgagcggctatcatttttccgagggcatcgatcgcatcctgatcagacgtgagccctagttgtggatagtggactaagtgagtctctggctcaggatgtttctcatcacgagattcacccggatattgaggagatcccaaattgtcgctggcagtttcgatgccaagatcatgttgagcaatatctgatccatcgacctcttctgaggattcgagtgattcatcttgcccagcctcctccgaaggtgaggatgatcctgagttatcgcgccataggtgactggaatcaacgagatgttcttgatatgtttcatctgacgcctgagcttcgtcggtggcattttcggtaacaacatcagcttgagcggcaggtgattcatctttggtattgggggagtcatccaatttatcttccgagtccgaaagtcgtgctggatggtcgtgggataggttaggatcatcaaaagcagaatactgctctagttcatttgacatttgagctttgtcgccagtagtatcaatggccatgtcagcttcgacgacatctgacccatcaatagctatggagtcgattatctcaactccctgcttctccggtaaatcttctgagcctggatatgatgccgaatcattgcggataaacccagcatcgaagacatgttcctgctggacggattcaacatccggatcaactgtttctagatctgcgtgaatggaatcgatggtgtcggtatcatgggtttcgatggaggatgctgcgggcgttgctatggtatccattcccgcctgagcatatccaatctcttggaattgtgtgggcgcggtccatggcaggaaatagctagttgagccagcatgatttgatacgagtggcgaaggaatcgggagccccggagaagggatgggtcgaatctgcggcgtatccgttggcagatggaaaagtgtttcatgatcatcaacttgtccatgagacacaacatttgactcggcggcatgtctttcgaggatactcccggtcaattcaagagaaggcttcgcaaacactggaagtggctcttgtggtgcatcctctgtgtatgttggagcttcgacatcatccgtcatggaagcctcactcgccgagtctgcctcgagttcttgatcgatagattgattcaaagcctgttcccaatccacaggagcttcttgctcgcgagggctttcgggttcattgacaacacgccaatcttccctgtgcaagctgtacctcggcttttttcttcctttccctggcacaaatccatcttcttccgtaaaaggatcgaaagcggaacggattgttcccccaagtggggttcgagtagaattgaggaacataggtgatccccagggccgttcactagaaggcaggtcgaattcgggattgattgatttgccactaggggttgtaggcgatgctggttcggtttcatgcggtgctgtcacttgcggctcaaccgatattatcaacggaggttgggaagatcggtagatctagataggcagcagttagtcaccataagacacatatcgagtttgggagcaacatacctcgagagatacgccattctcaaagtgcgcatcccatgcgacagacctccccggggttttctgggcgtcttcgttgctgacaaacttgatgtctttcaaggccagactaacggtatccccaattccgacatgcgattccgcgaccctttctgcgacgcgtccgtggaacgtgaccttgatttgtcctctggcgcccctcaggcggaagtccggctccgctaatagaaggctcacagtcttgatcgaagaggagtatggccacacaagtgctacagctgcaagaaaagacttctcggccaatttctcaaggtctggggaaagctgagctatcgggaccctggtcaactgcgccagcgcattcgacgcgggagactgctcaatcgcgttcattgcgccggtttgcccacgcccgactgacttttgttttatcaagctggcctcatatcaaacaggagtaatagtcgatataaaataagaagggtaaaaatgcgagtatataaaactgggctgaaaggaaatgaagatgaatatttcgtgcaacaaagaggaccttcggcagctgcagctctgttgggtaatgttacagtaaaaacagcaagaaaagggcgtaatttcggtattgggagaacgaaagttaccctcttcggttggattgtccatgtccaataagacttgctgattggtcgatcttattatatagtcacatacggaggattatgcactgcttttgaacgtgaacatagtgaaaacattcttgtagtgtattcttcatgtcgttatgggtctacgctataagacaccggatataaaaagcagctccactatggcgaaagcgcttggcatcctccaaggtcacttcttttttctcgcaactcaccttcgcatttctgactacataggttaccaggaattcccaagagctcgttgaaagcatgtcaatcacaaatactattcggcgagtggctgtcatcggcgcggggccctccggccttgctgcagtcaagtaagcggggttgttacacatccgccaacatgacaatgctgaccgactcagatacctgctcgccgagaaatatttcgatcaaatcgaagtcttcgagcaaagaagctccgtaggaggagtttggaactacagtccgagctcctctaaagaagggagatcaacagctgtcccacatttaaccccccatgagccagtcgagaagccagtgtggatcgatcacaatggggggcgtgaggcaacattcgtgtctccagtatacgatcgactggaaaccaacatccctaaggagttaatgcgctactcggataaggccttcccattggaatcccagctcttccccaagcatcggacggttaaacaatacctcgaagaatatggcgaagacgtcaaaggcctcattcactttgagacacaagtcttagaagtgaaactcaaggatgaaagtctgagcacttggagtctaacatcaaagagtcttcaaactggcatagacacaacccacacatatgatgctgtggtggttgcaagcggtcatttcacggtcccttacatacctgaaatcctaggaatacaagcctgggatgcatcatacccaggtgctatctctcattccaagttttacaactccccagaacctttccaaggaaagaaagttgtggtggttggaagttctgcttcaggcctggacattggttcccagatcaatgaagtaagccaaggcaagctgttggtctcccaacgatctgaatcatacttggctgcatccgcaaatgacgataaaatcatctgcccggagatagtcgagtttcttccttcgacaacctatgacagaggtataaaatttgcggatggtcgcatcgaggaacatgttgacgctgttgtcttctgcaccggctatttctattcatatccttttctatcctcactcaacccaccggttgtgacccacggatggcgaacaatgaatgtctaccagcagttattctatatagagcaccccactctcgtcttccccgtgctttcgcagcgggtgattccattccctatggctgagaaccacgctgctgtcttctctcgtgtatggtctgcgcggcttacgcttccaccaaaagatgagatgaaggcatgggaagcttccgaaattgaagccaaaggagatggaaaggatttccatttgcttccatttcccatggatgctgactacctcaattttctctacgactgggcggagaaggccaacccacgacctggcctctctaacaacggacaaggcaaacttggtactcggtggggtgagcgggaaagatggatgcgggcccatttcccagaaatcagacgtgctttcgtacaacggggtgacgcacggagcgagatcaaggatctagcggagctcggtttcgactttgaagagtggaagaggcaacaagatgatcagtgatgattatggtacaatttcacatctcaaccagtacctacagcattaacggtgatctaaatcaattagaaatccattagttttgcatcttttgaatcattaaatagatatatgagcctataacccttgatcagcatgtcactattcccaaatattgtagatctaccgataagcgttatcacgtgaagcgggctcactatccgtccgcccgtcgcgccatgcgtttaccctctttcatataccgtcacagtgctttggggaagtggtagatgttgcccagaattaaaaattgtatgtgtctcggatcaatgcagctcatatgagcttatattgagtattgaacctacgctctcatttcaccccgtcatgttatccaacatctccccgacactaatcgcccgcacatgatgcttcgggagcagcttcgctcgccgaaactccaaagtcaccacagaaagaatactgaccggccttcagctacaattgtggttattagcgacagcagtgagagcagcgacggtagtgacttggacgacgaggagtggcctatcaagtgtatcctccgtgaaacagacaccgagtatctcattgattgggagggtccatacgatccgacttgggtgagttcccgtggcaatattggacataaaaggcatcaaagaaatgattgccgagcttgaactaacaaatgcgcgctttgcttgtttaggaacccaaagagaacgcaagtgagcttgctatacgggtctggaacaagcaaaaagctcggcgatcaagtgcgctagatcggaagtcgacaagtaggaggattactcaatcgcccagcgtcgtcgaagtctcttcctcatcatcagaagagaacacaggccaaggggacagctaccgcactaccttcgacgagactgaggacactgattctgataatcattcaagagcttcctcgtcgctatttgtgcaacaagacaacatttcagagatagtagactctcttcaatctcagtacattgaagtctcgggctgcttttacgggaccgcctctctacctcaatctccatctacaaaccctcgcctgcaagccgacgaatacatccctgagtcacctattccacctgaatacccgcaacgaggtgagtgggacgacgtcaatacgcagcagcctggcccggtttgtgaccaaaaggccgatttaattaatagatgctcatcgcatcgacagtactctgcggaaatcaaccacgtttctgaattattatcacacccgaacacgccgggtgttggactgagctccaacgtctccgaaatagccgagacgcctgttcagccatcaagtttaggaaccgatttctcgtgccccggctcctatcctttttataataccccatctcacaacaatttgacttttggctcgtgtggctccatcctgagaggtagtttcacatgcaaaatcaagttttacattttgttcacattttgctcacattctcacagactgcgtgttcgtccggtcaacttatctgagctcaattccggaaacagtctgtcaaaacctgtcacagcacccagaagagctcagtgctgaaggtttcacccgaccaatgccatcattttctaatctcgtacaagaagaaccatttggcgaaatcatggaagacaaagagcccaagccatcagatccttctctctccgctgccactttggaccgatacggacaattgccagggtccactcccacggaaatgatacggaacgcctgggccaaactcagcgaagcgaatcaatcagagctatcgcaaccagctaacgctgtccaaactccgtcttctgtgggggatattgaagcttcgatgcctgtgtctatccccgaaacaactgctctgcttagcgtcagacccgacacagactctttttccaattcccatactgcagtccaccatggtcattctgaacctttactaccaccctcggaactagcgcacgaagctcatatgagccaaccttcacttcaaactattcatcccagtgcgttgaccgtcaccgacatggatgaggtggttgcgcccggttctgtccaccttgggccatctgaatttgctgtccctcttccgatgaatgcacgtgtgaaggatcactacgagcgagtactatcagatgcagctacatgcatacgcaaattttttgatagctttcagtcgaatactcaagtttcggagcctgaggcaagtaggatgtttctgggatatgattcgcattgcttacattgttttcacagcgagaggttttgcattcacatatgcgggaggtcatcgcccggctgagcaatgttgcaacctatccagacttgaatttcgccaatcatttgaaaaataccgaccctgactttgcggaagaggcatcctgggcggaaatgtccagtgcaaagtttttcctacttggtcatttcatgaagattgtaggtacgcacgagctccatctgattctcgctgtacaagacgagaagaaacagggagttctcgagcgttatctccaagggaaaggttttgcatacacccgaccccgtgcagagatgggtagcaccttggaggtttccctagccaaggggtcactgagctttggaattcattcgagtgagaccgcccgtgaactttacaagccgccgtctgctatttttgccctggattcgtatttcaaacccaaaagcccgttcatacagcatctccgaacgacttatgcccgaaacgggagcttgcttcccgtcatttggtttcttgtcgccaacacaagtgaacatatcgagcgttgtttgcccgagtcgccggatcctgatcgattgcgtttacttgtgcactacattgcccgtttccatgacgaggccggtgagctccaggatgatgccctcggcgcgtctgaagatgccgaagagattcttggatatctcttggatagtgttgctggttggccattgcctaccattaaacctttgaaccttgtatcactggaggagttagagtgcgacagctcttcatctgacgaggcgatgccgccggcccataaacgcacactggtaattataccacatgttgatgtatttgaattcagctaacgctttggggcaggatgagaaacccgatgaacactcgtcgaagcgcgcacggattggtacccaagaggacagccagttgaccgagtcaactaagcctcccactcaaacgttggaccgtgatttgatctcattggagaagaatattatccagatgaaacacattcacgcaagtgaaaaagcccagctgcaggctgagcttgctcgggcaaattctggattccgagaaatggagagagctctgggtattctacaacaccgttacgagagtcggacgaaggaactccatgtaactcgccaagagcgtgatcgtgtggttgagcacaagccgtctctagaacagcgcgtcgagaaacaaaaagagactatctctagtctgaaacaagaacgggcagagctgaagcgcgagctcgacgaagctagacaggcactcaaaaatggcggtggcagtaatgctgaactagagatggcacgggaggaaatccgtcgtctgaccaaagaaaattcgaaccttgagcgcaaagctgagtttgagaaaaaccaatccgagtacacccgagagcaataccaaactgcgtctaccgcggccgctcagtctggcaccgaaaaccgccatttggccactgagaatgagagactaaagcgcaaggccgaaagcaatgccgtgcaacttcgtgagttgcacatgaaggatgagtcggttcgccatctagctaggattgaagagctagaactaactctggcttcgcgcgacgaattcctacaaaggaaggaagaagagcttcgtgaaatccggaagaatcgtccgtcaactcgctcgactagcactcaaccacgaagccccaagtgggcgggcagccgtccgaccagccccggggttggtcataatggtaacggtaatggcggtcatgggggcaggggcagtgcgctacgatacagctcagaggtgcctttctgagggtattacacaatatcccataaactttcatgtcccctgccattgatcatgttcttgccactcatttttcctacaccaatctatgacgtctatacacgatacatagacgggggatttgctctttgcgaagcatttcactatcacattagctagatatttattcctttcatccgctcattacgacattgcatcttcctggcgtttcatccattgcgactccacatttacccatgagcgattttcgttttgcgagagaaaaccgggtcttggatgcaacattatctgagtcttgtcatctccaagcaagtcaactgtttcatccgattttcatggtagttcttttcgccatagatctaatgacagacatcttagtgctttagtttttttgagaaaataaagacgattcttccaaatgtaaaacatcaatctggatttcgtattcggtaattaaaatgtaagcaaaaagtagcaaagggccgcaaaattatggattatgtatacactgagataataagacagggaaggaaagaaatactttgtcctggacagcagcatacaaaatggacagataagtagaagagaaaagagcccatgtctaaatctcctggaaatagacatgtcacagtccccgaatgcaatacgtttacgccgaagccatagagttagcaatgaatgtagccagctccttggccttctcgccacgagtcatagtgaaatgattggcatcctccataacggtgattccgccgacatgattcgggccgacgagggtatcccaaccatttggaccgagatcagtgcggttgttcaacaaccagagcatctcacgagggtctgggctaccatctgcagctggtgcagggcgggcatcacctggcttggagcagacaccatccttggcccagaccatgaaggtcttggggagcttatcggccagcttggggtctgtgtgagggaagggaaccgccttgtaagcatccagggaatcgatgaaagccaggaagtgagggagaagccatttaggtggaggtgccttgccctctccaaacagtccgaccgtatcaaagaagctgtacaggcggcgaggcagcttctccagtccaacggggaagggcgaatcaagaagcagcaggcgctcgactcgctcgccttcctcgaagatcagttggcgcgcggcgtcgtacgcacaaataccaccggcggaccagccaccgaagttgtaagggccagtgggctggcgacgccgaatctcagcaatgtaaggagctgtgagctcgtccaatctggccttgagattctcaggggtgcgcatgtatgggcagttcaatccatagacacacacatcgggagaaattccagggatggaagcataggaggtagcagagccagagccatcagggaacaaaaacaaactctgagtcgctgtctttgggtttccttgcaggaggattgaagtggccggcgggtgctggggggtagtgctgggagcgaccaccggggctcgaacagggatttgttcggggaatctgattggctccgcaggggctggcttaggctttagacccaaggtagtctcgatatcatcgagtgtttgattctcaatgaagaactctcccgagagatcaagatcaagatcttcacggattttaccgagaacggtgagcgacatcaatgagtctaggcccatctcagcaaggttcgcatccccatcgagctcctcgggttccacaccgatctcctcagccaagattgaggcaatctgcctcatgctgtcattttgctcctgcgatccatgtgccatcggcttctcatttgcaggacttggcagaccactgctgtttggactcgacaagtcggtcgaagatgcggccgacgacatgtcaccttcactgcttgatccgtcactactttcactagggctcatttgagctagaagatttttgaagtctttgacagttggattatccacgaagatagtggagtcaagatcgagtcccatgtcctcgcggtatcgcccagtgacagtcagcgagagaagggagtcaactccgtaatcagcgaagttgaggtcatcagtcagctcagatgccgaaagtccgacctcttcagcaaggattgcaagagcacgcatagtcagacttggcattccagatcttggtgaaggggcagcctttttggcagagccagtctttgccttctcgatattgacgggagcaggaacacgcttggcggccggcttggatgccgctccagctggaggaagagccatgtcgaggatctttcgtgccagagcttggaactatgtcgcattctgttagtgtttcattcgagaatactacgacggtttttcgacataccttaacaccaccaaacacagcaacgatgtcatctccatcaaacatatagacatcaccagcccaaatagactctttccagggttgcatcctcacgtaggtgcggtaagtgacgctcggatcgaacttcttcaagcacctcatcgagtcccatccatgattgacgaacacttggttcttcgaatcggtgttatcactagcattcataatgaagccagacaagtgaccaatgctgtcaatccagaatggattgcgatgaaagttgcccggaggagcctcaaatttgaccagagcggtagcttcgtgttggtcactgtcgaggatgacttcccgaatggatttgtagttctcgtcataatcaaccagagaagcaaagagcttgtagaccattcctcgcttcatgcggtgagcctggccggatacagtgctctcttggagatgctcaatgcttcgcttgatgaggtaagagctgcgcttccactcgacgtcgtaagtactgggatcaaagaacttgatgtagcaagtggcgtggtcaaggatcttcttcccctcgggggtcacagaccacacctgcaccttggcattttcttcggcccagtttgcagtcgctgaaacgcggaagagctgcttgcctccctttgcaataagcggcttagggaccaccatgttgcagacatcaaatccgcgatctttccattctggcttgtagttctggactagatattcaccaagtgtttgggcgatatcggcgtacagggactaaaaatcaattagcaagcaagactgttaaatgagaaaagaatatgcataccgatggagtaaggcaggcaccgttcaccttgtgacctgcaatgacacgattgaggtcgggatcagcaatgtcattctcgatgacgatagacgccgacgaattgtcaccactcgtctccaaaaccttttgtgctgccgatgacaagaaaacagaaactggcgcagcatcagccactgataccggcggtgcacccttgagcagacagaagttattagtgtaaggaatccagtagttcttgagatcccacttgtaggaagggagtgggagaactttgtgtccagtgaagtcctggtgatattccttccatcgaatgtcaattccagccatatagagagctgaaacactggttgagagaaccttccacgtgtcttcctggcgacggagagatgccacagtagttgcctgaggaccgaaagttgccttgaccattccggagcagaccgggtgagagccaatctcaacccaaatagtcttgtcattcattaagttggagtgccgggtagcttcaagagcacccaggaagttgacagtctcccggcagtgacgggtgaggtagttggtaccaagcaactcaccgttggtctcattgatgacgtctccaagaagggcagatacgaatggaatagagggcgcgttgaaattgacgccctttccaatttcagccagactttcaagtataggttcaacctgagctgaatggaaagcaaaaggtacatttaacttggtagccttgaacccttcgttggtaagagtttgcgcaagctcgtcaatcttctcgcttgcgccactgataacagtctcgctgggcgcattgatacaagccacctcggtagcctcatcaagaaactgcttgacctgtgccactgaagacttgacagcaagcatagcgtgcgttccaacctcgatttgttcagtgagaagctgggctcgtcgcccggcaaggtagattgtgtcgctagttgtcaagacaccggaagcattcagcgcggcaaactcgccgaggctatggccaatgacaaaggtaggtacaatacccagagacatccagtactttgtcaatgccatttgcacacaggttgttccgagctgtgtaacgatcgggctatgctcttcaattggcacactcccgtcgaccagggacagaatagatgggaagccctggctctcacagatacaattcaagtgttcgatgtgagcacggaattgggagcaactatcaaacaattggcgtcccatgcctgtgtactgagcaccttgtccggtgaagataaatccgatgccaggtgcattggcaggagccgggctgatgctgtctcggttgacgataggagccaatgcactcctgacttcatctagagtagatccagtgacagcgactctgaagggatgatgaatccgtctcgctgtagtcgtgtaagacagattggcaaggaggcttgcatcgttggaattgaacgagttcttgtttgtatcgatgtactgcacgagagcagagatgttattcttcagtgcagactgggaccgagccgaaacaagcacaggatgcgcagaccggatatcttccacattctcgtcattgagcggaccatcctcgaccatcaaagcagtattgcctccggcggccgagaaattgttgatgaaagtcttccgcttgccaccatttggcctgttccaggggacagcttcagatgcaatgtgcacattgcgctgcgggaagtctgtcgggaagttgtggttgatcttggtcttgatgccacagtgagggggaatcatgttctttcgcatcatcatcaagaccttgatcagagctgtgacaccagaggcggactctccatggccaacatttgactttgctgaaccgaggtgaagagattgggttggcccacgacggtagtcaggagcgaagacatcgagaaccgactgcatctccactgcatcacctgcctgggtgccggttccgtgcatttcgatataactaatctcttttgggtcgctgttggactcgttgagaagcttgtcgaagatgaaggactgtgctcccacatgaggccgagtaattgacacagcctctgctgagtggttggtataagctcctccaataataccgtagattggatcgttgtctgcctgggcatcctcaagtctcttaatgacaatggagccaactccatctgctctgcaatagccatcagccccatcatcaaaggtggtacagtttccggtccttgagaggaagtgtccacgatcaagaccagcatgattgtcgggatttgccaggatgttgacaccgcccgtcacggcagaatcacattcattcctccacaaggaattgcaggcgacatgaattgccgcaagacttgaggagcaagcggtatccacactaacactggggccgctgaacttgaaatagtagttgatgcgaccgggagtaaaagcacggttaccacccgggataaagtaggtgtcaatatcctgaccactgttggtctcacggtagtcatcactggtcattccatagaagacacccactcggttcttctgcgtagagggcgtgctgtcagggatgaagcctgccatttccaaagcctcataagcagtcaagagtgccagacgttgagcaggatctgcttgaagtgcttcacggggagacatattgaaaaatcgagggtcaaacatgcccgcgtcgtcataccagcatccatattggacttggctggtatttcttttctttccttccatgtcaacgtgagccttgacatcccatcgctctgggggaacctcgcggtggacgtccagtccttttttcaaaagatcccagaaagcttcggtatcaggcgaatctggaaatcttcctgaaagaccaataattgcaattttggactgctcagcacggccggtacgattatctccaccagcatccttccggacatcaccaagtgtgctgtcaacctcgagattggagactccagcctttttcaatgagttaaataggctctgggttgcagtgctggaaattgggaacagagtgcatgttgttgtagactccaagattgactggcaagattggatgaccttgccccagcaaagctgtctttgtagaatctcctgaagagaaaatctcaagagctgctcaaggctctcagcctggagctccttgcctgtctcacttgacagcacagggatctgaggcacgtacatcatgaaattctctgtaggccacgattccaaaattcggttaatgtccctgttatcatatagatgagaggcatgataagggccgtggattggaaccattgtgggcttgtgctcctttgagagactggactcaatgaaacggcccagaaaagtcgggggaccactgatcgtgagtccattggggcttactgcgctgatataaggttgagaaacgcggggcaaggccttgaaaatattaacaatgatcctcttttatttcaagtcggtttgggggaaaagacttacattcttcttcgtgtactgttgaatcaaatcctgggcctcgggctcgtgcataccagaaattagtacagaccagcttgatgttgccgatttgcttggttctatgagctcttgtactttcaaaacgcacatcccgagcctcaaggaaacaaggacggtctcaattccagctgcaataagctccccgatagttttcgaagagcttacggccgcagatgcgagttgaccggtgcaaagtccaatgatgcagctgtcatcacccgacggataggcatggcccaaatcaccatagtagctataagacattgtcagtaagtttgattccaaaatctcatctcgatatcatcaaggcggcaatattcttactggatgaagcatcctagttggtaaattgttgtcaatgcactctctagagctgggttcggccctgactctttgaacctcgcgagaaggtcaacgatactagtaaagcgagggaagccctgacgttcggatggcggaagcgatgtaatttccttgcgtaacgcatagtagcacttttggaagaatgctgctacaagcgagtcattcttagcatgcaacagccgacgaagcccggagtcaaaatccgcagtctgatctccaaagagatacaaatgactggggccctccataatcttcctggtagcagattaatggtttcaaagatatatggaaaaagaagaaaggttcaggtcaggcgaaaacttaaggatatcatactttatagagtattttccattagtgggtcgtcagtggaagattgtaatagactgcctctcaattttcttagtagtatcgaaataggaaacataaggtttaggacccatactttttctgaatcaggatatagcaggatatacggtatggtaactcggctgaacccattgggaaatgtatgatcttagccgcatattctctagtattagcgagaattattattattggtatttctggtattgcgatgtatacatcctcaaagacaccaatggtaccgttactgcagtcgattccataacgccttcaaattgtcggtatgtttgtctgagcagagcctatgtggagatgggctggaccgaactagaatcttgtttccttggataatccgattggatcctgaattatcagtttgaattactaaagcaaccggcaaaccgatgatagtctacggatacccgtgtgctgtttgcggataaaacgagcaatgaccccagagcagagatcaggattttggacgggtatgtgagccgggatgtccgtgacaaatctatcatatgatagtagaatcatagactatagacccgtgctggagaaaaattactatgaagttgcaatcaaggagataatctcgctgcattcggaaggttacagccgctgcttccacgtatcacgtggttttatttgccctagattgatctccctgtttcttagactagaaattttaagtaataaaataatacatcaacgttcaatcgaagatcttagagaggcttgtttgcctaatgttctcaaaacagtaggggatcacataagtatagaagacccttcttcagcatggaatcatcaagatctagaatagtgcatgggatgtctcaaataagtaagaaaatgtagatcatctgcaggcatcatctgtaatgttttttcatacgtcacgactccagcttcaaaacttatcttctgagacattgagtcttgtttcatatggtcgcggcctggaagttttcactctcattcttacggtgccatctaggccatgaataagatattcaaataaaaatgttcaacaccttcgatatcagatactactcaattgacattctagaataaaccatagattacacacgtggctagtcggacgatccccatggcgatccagatgttctcaagcaatcaaatcattgattgacgacggaataagatctgccgataaatgaacgcaaacggactatcttctacaacaaacggagaacgatataaacaaatatagtaaaataaaactgtatggtatcctagctagtattatattacaagataaatgaaaataaaaaaagtatgagcacagttaacccaacgcttgtcatctttagcaggaatggaagaaaagcatagccacgccctcgcgatggagctcgtgctactgaggccgaaccgacctgagaaacatgccctctgcagctagtgtggggcactcgttacctaagcaacgcctctaccaccaagcctatagtttgaggttggagggatctagtcctcacactctgaggccacacatcaataccgtcgagtagagcaacagccattccattggccatgtgagtctggatatggcagtgggagatgaagggtccagggttaacaacctggtaccgcactatcatccatgttggtccgttaggtccattagtaacgaaagtatctctcatttgggggttctctagttggaagagttcagggcattcagcataagcttcttcggtgctgaaccaattgaatatgccaggactaaaactaagaatgaaacccttgttagagtgcttgtgcattacatgcggggcttggatggcaggactgttgggcatttcacccaactagagcaacatatcgacccaggtcccatttttggtttgaatggtaacctgcggctctaggttgttcttcgcgttcatgtcatagagaatcgggtcgtcccagttagccatcatgtcgtacaaaccactacctgaagtagtccatgtgtaagacgagcccaaacggccaatggagaggttcaagttgattggtggctttagggatagtgacagcagggtgattcttgatagccttgttttccagagcaacaacaaaagcggaggtgtttcttccgccgtaatccacgtaaggttgagacgcggttgtgtcctgagaacccttgtatttcattgtagcaaacccagaaaatacctgattggcttgggtatctggaatggtgtattccttctaaggcttgtcaagcttgatcatcgcggcgtagcgctcaccgctgaagatgttaacactctcagcaaactgaggttcgatgtagctaccattagacgcggcacttacgaacttaagacccacccagccagcattaggatcaacttcaatagtctcgtgcaaaccgatggtggtagtacagccagaatcaaggccagctgaaatcttgtcctcgtatgtccattgttaatgaacttattgattccggagaaaagtatagtatatcaatggaatatgagggaatgagtaatcttgcctatcaatctcgacaataaagcttgcctgcgtggaccagggaagcagtatttgaatggtttgcattgtgattattatgataatcccaagcctcatgcttctggggctggatgatcctttgatagtagccgcaaacatgtttgcatttttgacaaattattgtttgtcgaatttgcatagtttggcaaagataggcagcatgggtgttcactagggaatgtccaggtggctggggaagctttgacctcaaacaatttccccttttaacccagactagaaggccgaggaatgcaaggtcattcctagtcaggatccaagataattcaaggggtgtctagggatccgaagcagtagactgtttgtgcgtggctagagattccgtggccgcggtgagaatgtggcaattcccgatccggcagcctattgtagaatgacatgggctatccaatttcccgattttggagttttaatgcataatataaagacttcaatagctctaattgcttgcttgcaattttcgttctgtctttgatttagttgcctcaagtgagtaagtgtgcggatggattaaagcgtctatgcgtagtcccttggaggactaaagcatagctattcagctcaagacataatactgtgtgggattttgtgtgattccgcggccgaaagaaagcttggaaggaaggaaagaggagcaatctaaaattactagtactgagcttatatatattgccagttgtctgagattctgcacaatcaacaagtcaacaagtcaacaagtcaacaagtcttcaatctttctattctacttggatactaagaaaatgcctccgctgagcatggagtagtaaactagatttcctagtctcagacttatctataactaataataagggttagtcctcgacagttctgttccaggttctcctagagatctaaatctaacaatccccgagtatctcacctttctaaggcagtcctcaggattattcatttgaatacagacccagcaggtgaaaataaagatccgccagggatcctctgttgtcgagtgtaccagggttgttcagtaccgaaccatggatcgggtacggctccggccttttcatagaagtcgcaacatctgggggtatatatcgaggtgctcgagtaatatgacaccgcagggcttgatttagagaaatccacacacataaatatagggagataacctccaggaagaggaatgacctttgaacgatcgggaaacaggagatattacataatctgcattaagcttatcgataagccagccctccgccgctagtctcgatcgggccacaaacaaacaaccccagtcccggtttacgccccaattgtcgtcttaggcctcaccgatttgaatcgctctaccttctcacgtcttagcaaccggttccttggatccatttggtgcagttcaatctttattcgctaatcctttttattttgaatacccaattaaaactccttattccgacaatgctgattgattgagcgatcattgctatccctgcggccgtgcggaccttgtcacctatccgaccaagctgtgttgtatcgggttcgaatcaacagcacaacctcatcgattgatacatcattttcctaccttcacctggacgtggacttgtcacaagtgcgccaggtgttgaaacagcctattaggtcgatcccgtgggttgcgctcgacgaaactgtgttcaagtaatcatcatggctcagctgccaatgcggtttccatgctggtgccgagcagtatattcatggggtggagagactacacgagatctgggatttgtggagggtgacttgatcgaatgcttgaatgcgggcgatggacaatggtggatggggcggttgcgccgtgacaggcgcgcggttggactgttcccgtcaaattttgtcgagctcctgggtgaagactttgtgcccgtaagccgcgatactactagtccaatggtgctagcgggatcttctccgatcaataatcccacatcagctcccaagaaacagaagaccgtttggcggaaacccttccaggcgcataaggaggccgtatcaccagcatctgtcgctcggcgcgcaaccgcaaccagcccagccgcacctgcgattcctcaaacaccacctcgggctggcggcatttcacgaagtaccaggccattgcgcacgcatgcgacagcagtcaggaaccaaggctcgctagctcgacccacatcatccacatcgcggccctcgtcacataacgtctcccctcgttcgtccgcagagcctgaacggtcaccatcaatgctgccgaggggaagcgtctcatccgctcgaccttcatcccgcgaccaacctccattacaatcgcaggaacgtccatatgcaaacacctcaaatggcagcctctcatctacccgtcgcaacccatcccctttgccaatacgcgaatattcgtctggaatcatcacacaaggcagtactcccctttatcgggcttcatctcgtgagccgtctccgttgcaaatgcaggattatgcgtcccaggccatgccacagggcattacttcatcttaccggggctcatcgcgtgagccatctccgttgcaaatgcaagaatatccgccccccaccatcccccctggcggtatctcatcctatcaggcacagtcgcgtgagccatcgccaatgtatatggaggatcatccagctgcgagtatgccatatggtagtatgccatcttatcgggctgcatcgccattacaaattcaagataattcgtctgcaatggtcccatacgggcgttacacatcttaccgggccccatcgcgcgggccgtccccgccgccaatgcacgagcattctacaatgagttcgcatggtggtatgtaccgggctccatcgcgtagccaatcaccactgtacatggaggatcatccacctgcaccagtgccgcatggaagtatgtcctcctaccgggctccatcgccattaccagcacgagaacatccatctgcactcgtctctggcgggggtatgtcatcttatcgggttccgtctcgtgagccgtctccggtgcaaatgcacgaagagcgggaagactctccccctccccctccgccgccgccacaccgagtcgttgtcggtcgttcgggctcacactctcctcagcctccaatacattctcaaacacgaagtcattcgccgctcccacctatgcactcatctcaagatcgcgcacactctcctaacccgccatcacactatccaaacccgtcacgatcccccacgccattagttatgaatgaccgttacacgacactcaatcgaaccccatctccatctgcggcctcaatgcactctgctctttctgcaacctcgggacaatccgatatgcatggaaatacgccatctccgctccgagatgccatggaagatgttatgacttcactggaagacatgggtctcccacgccaagaccagtcgccctctccgtccccggtgttcaacgagccctggtccccagaagagtttgatacctctcaggaaaggaccccccaggggaacagacgccgggatttaacctcaatgggcttcgaaggagacaaagaacaactgcagggcggactcgtccatcgaaacagcgtttatagccatgaccacatggatggtccacctcaactgaacaattatgttcaaaggatggagagccgcctacgtcagctggaagatcaaaatcgatcgtctgaggatcgaacaggcggtcaggatgacaacggacctcctccccctcccccaaaacatgccacctaccacccgcgaaataattctataccaggacaatacgctcccctcaagacccggcgttccggccatgatctccgcggtgatattctcaaccggacatttaccaataagtctagtaccaccaattcgtccagtggaatgcaaagcaatggcacatccatgacaacgagcacagacaaaactggtcaaagtgtgatgagtgggttttccgcagggggattcagtgcgacgagtgcggggagctttgctagacgaggcgggagtgagaggccaaatacagctatggacactgtccgctctcgaggatacagtgatgcccgcccggaaacgccattcactggtgtttcctatcattccagtcataactcctctcgccaaggtgcatcatcggctattccgtggacttccaccggcctggactcgacggatcatagcggagtttttggcggtctttcgacgccaaaaagcaaaaagcaaggctttttcaaaaagatatttgaaacagccaagactggtgcagccagcgcaaggagtagcatttcggtcgggtcaaattctccaaccaagagtaacagagggatagacgccgtgtcaccggctccgtctcactcgcaccgtaatagtggtcgtgacatgggacttggaactaacgccattgactgggtgcaggtgcgccgtgatgttaaccgagcgtcgtctcctagccgaaatgaaaggattgatagggcagaacgatgccagatgatggaccaccctgttatctactccgtggaagagctgtatgataccgcagagggcgatgaaagcattgatgggcagccgatcactgagccaacgaatttccacgctgccaatcttaccctcgttgataagagtgcacgctttatcagcagtctacctccaatgacgaaccccatgagcctcgcccaagcctatatttgtcgaccatacaagagtgatgttcagcgtctccgggccatctttacctgggtcagcgagaaaatatcgtgggaggaacctctcgacggcgtcgaggttgacatgaagagacttctgcaggccaaacgaggtaccccagaggaaatctcagtattggtgcatgagatgtgcacagccgttggcctgcatacagaagtcatccgaggattcctcaagagccccggcgacgcccttgacctggaaagtctctcccgccccaaccactggtggaactctgttctggtagacggcgaatggcgctttatggattgcgcacttgcaaatcccacaaatcctctgcgcagtaaattcatttccaacaactcctccatatcggagagctggtacttcctcacacgcccgcttgatctctgctacactcatgtcccactctatccggaagaacagcacatctgcccgccaatttcaccagatgttctgctctccctgcccaccgtgtgcccgccattcttcaaacttaatatccagatgccggattatgacacgagtttcctccgcatcgacggattggaagtcatgcaactgcgcatgatagtacctccggatgttgaatgtgctgccgaagtcgaagccccgggattcgcccgcgacgtagatggcgacgtgttcgaaagcggagacattgtgcgcaagcgcgccttggtccagccggattggatccgcggccaaaagcgcatcacaatcaaggctgtgctgccaggcgacgaaggccagggtgtactgaaaatttatgccggcaagaaagggctaatgcactccagccgggacatccctcatcccctagccttagccctaccaatgacccacacgggagagaatccaccttacgactttgtgctgcgccatcccacaccccacgcccagcgacacgacttgtacatcatgcagccacagtgctctcgcctggcagttaacaatacgtttgtgtttgctgtccgccaacacgcttctgctccagcgtccgccatggacgagagcacttccattggccgcgcctcaccgtccatctttaatcgtccggccagtgcgttgagcatggtgtccagcaccacagccggtggctcaacggtatcgggcgcctctaacgagttctcggcgtcgacttcggtcatttcctcgggcagatctacttcggggcgggacaaggctgcgaaattagcgatccaatctccgtccggcaaaattcttcgtcttacccgtaaagctgaacacatgatcagcagtgataatggcaaccaatctatcagcgatgctgtcgccgaaggcagtgtttgggagactgtcatcaagatcggtgagcgtggtatgtggcgcggtctcgtactagctgaccgagctgcgcgctggtgtgtattttgcgagtgggaatgtgtttgattttttactgttacatattatgggcgtttatcttgaagccttctgatacaccgggttcagaagcaggtggctctctgtgtttttttttcttttggcttttttgcgttgtgatattgcgggttgcatatttttggcatattgtcctcctggcatactagcatttgcatgaggttagcttggggcattgcatttgcatccgatctgtccagaatctatttcaaaaatctggatttcggtgttagagtctaaattaataatagtttgagaaacccaagtccgcataagtaatctatagcataattcaaaatgatatgggaactggctaacaggctaaatagacatctgacatctagtcacaattcttcgacatatttcatttataatttagctaccgccgcgcgcagcaatggagcaacttgcttcctactcccagccgcattggtttgcacccacagctgcctccagtggagggaatcctcgtccacgttcaatgtagaaagacaatcgcctgtcagctcagggatatcctccccatcgagcggagaccattctacaagcccaagatggtgagaggattgctcaataaacctctccacacccttgacagccgcttcattgccacccgtcacgatgacgaatagctcgcgacaaaacttgtcgtcagtgcccgtgaacgccgtcatgataacaagcacatccaagtctttctcggcagaagccgcgaacgagagcgcagcatcaaggaacttctccgggccacctgccttctgaacaagccatcgtatgggcttgacggcagaacagaagcccattttcacagtctcccccgaggactgtgacgtctcaatccagtctttataatcgcggttcaatatttcctccatcgtaagaagatcgagactattcagctttgcatgaagaatgctcttgtagaacgtttccagctcccaattgccttctgaattcgctgcagcttgtgattctccctcgatttgagatcgcaggaattcgaccgcctcacgatctacatcggtcactttgccttccgcggtgagatttaaagtatcaatcagcaccgccgaaagagcaagcttcgcaacctgtgtcatttccggggtcgtgtcccaaagtttccgttgtcgcaactctcgcgtgatgagcgatgcacatgacccaggtcccggttggataatcatcggctgcccttctggtaagccgtcaatgcttggcatgttgtgctcgtcgatgtggtggtcgatacatcctacagtccggaaggagacacccggcaacccagttaggaacccagagcccttatcggtctttgatggccgcgggaacgcgttccagtctaccagcgttgcatcggcgagtatctggtgccacacatgctggtcttcgagagactgcgcgaagtccgcgacggtcataacatactcgggtagaaaattgcccgcagactgaagggtgttctcgaattgctcttcactcttcagaggggggaaattggttgatgaccataatgcagccgagaattccggtcttagtcgatacagctctgtcccagcggggaaattggacaggtttagtagtgggatatggggtcgtgggctttggatcgggagccggttgttcgcgcagtaagagtagatgatcgccgagacgatagagtcaaggtcggcagagggattgccgattacatagattggaggctcggttagagcacccgagaggaagtgaaggtgcacttggcgggcttggcgtaagaactggaggagagtcatggttgttgaatcaattgatcgtagccgatatccccgcgaacagatatccgacgtcattcattcaattgctgacacatcggatatcggattgttgccttaaacacaaggccaaacaatataaattggaaatcgcgacatcctaacttgacaacaccaaaaaccatgcttagaacaatgtctctcccgatacagctgccagaggcgttcgccaaaatcccacgctacaacattttataccctactccttctcccatccaccccttatcctcaattgcacccccaagactctccccgcaccaccccctcatcaccatccacgccaaacgagaagaccactcctccccactagcctgcgcaggcaacaaatatcgcaaactagaatacatagtcccagacattctatctcaaacacccctccatcacagccatgagaacaacccaacacccccaggcccgcagcaaggcggtgcagcaacaaccctcgtaacagagggcgcaatccaaagcaaccacactgtgcaagttgtcgctctcgcacggaaactcggcctgaaggttgtaattcttctgcaccgcggcacaggcggcggacttgcagcagccagcgacaaggaagccttccaacacagcggaaacgtgcaaatcaatcaccttctcggtgccgacgttcgcgtctgcgaagaaggggatccgctagcgcatgatgcgacgcctcttctcgatgagttgagggcgtccggacagaatccgtattggatccctggtggcgcgagcttgcatccgcttggtgggctggggtatgcgcgcgcggcctttgagattgctgcacaggaggaggagatggggcttggaggttcggggaggtttgattacatctttgttgcgtgtggaagtgggagtacggttggtgggttggtggctgggtttaagctgctagacaagataaggggattagatgtgtcgaggaaggttgtcgggattcttaattcgccaactaagccgcgcgcatatcatgaaaagcgcgtgcttaattttgcgcggagggcgggagagttgattgggcttgatggggagcgggatattgggattgaggatgtgcggcttgatgatcgctttgttgggactgcatacggcgtgctcgatgataagagtaaagagactctagagaatatggcacggatggagggtatggtgctcgatcctgtttatacagccaaggttgcgagaggcatgatgcattgggtggacgagggagaagttgtagattctgctaaacccttagagcaggtcaatatattgttcattcatacaggtggacaggctgctctaggggcttatgtggatgttaaataatacatatcaataagatatatagtacagtcggaaacgtgagtaagaatggctgaattcaactagtattacacggtgacggtagcagcaaagaaaaccagtcatgacagacataagtcttgtggtatggaaaagcagaaaagcgtgaaatcgctggaaaacacccccggactcgccagtcccttctcttgtacacccttttttgaagattgatccgagcagaacgatagaagtataggagaggcaggtaaacaaaggactaaaagcgacgcagtaaagcaatcagaatatagttaaaaaaaaccgaacgagacgtggtcaagttttgaataagaacaaaagattcattgggaaaaaagtaagaagaatcagtcaaagttcttcgtcctcaaggccaccattagtgccgtcgagtttgggcccaccctgcggaccaccgttttcgccattttgaatcgattcctcttgaacagaggcagcacgactactgtcattactgaccacgagggcctccagggcctcattagcatgggtattctccatgggctgggtctcagcttcagggtcaatctcttggttggtcaggtctgcaaatacatcatctaggttctgacgagggctgctgctcgcgaactggggatcatgaccgaagcgtggagggctgaatagggagggttccaggtcaggctgaggaggaggagagcgtggtaggaatgagggggattgagaagcggctgcatgcgggaggaaagccgaggaggaagtaggtgcaaaagcaggcgtggaatcgctcgcgggtaatgaatagtttgcggagaatgggtatggtgcagcattcggatctgccatctgagccaacgttggacctgtgccaggaggttgtccgctactagaagtcggtggtggtggttgcatgggtgcggattgaccagtagctgcctgtgattgagcatcaacagatttccttttggtaacgccaatgtgcttggggcgaagatgctccgggagatcctctggacgattgactccaagctgagccattattttctgttgcttggtcgggcgcggttttcgtgttgagagagattgttccagaattggagggggttctggtgcgacgggtgcccacttgtgtatctcctgccggaagaaattcgtctcaaaggtgagaagaacctcagcgccctcgattttgcgaaggtagaatattagagtaggcacttcctcagtcgttgtgcaggcagcattcgtgaagccatgcaggaaatcacgaaaggctgtcgcttgattaatgatactctcaagaacttcttcttcctcgggctggaaaggcaaagttgcgatctccgcgtgccaatcttgcagatcttcaagcttgggacgagcagcgtcacgcgggatcttttgacgccagtcgcagattgggcaagtgtacttgtcgaattccttcactttacccctagcaatcttcaaacatttcccatggtacctacacaggtcagtaaataaaccacaagctggaagttttttggcttaccattcgtggcagacttcacattcaatcatcattcctgcctcggagtgcctgcaaatacagaacacatctcgctttcgtgactttgggccccacatgttgttgggattgctcggattctcaagcaaaccttcgggagaattgtctcgagacgaaggctccacaggaggtcggtaactgtcctctaggtcgaaacagtacgagttccgcttcgcgacgtattccatatgggatcttagaatatggagaggcgcgttcgccttaccgaacagctttttcccttttctcatccagtcttcatggcgcttttgttcacgttccaagtcgatcgccccgatgggtcgactcgtcatgtgctcaagagattccatgaggtctcggatgtccttgtacttgggccgattcttcatctccgggtccttgctcttttcatacagagtctgtatccgtttttgcgcctcacgctgcttggtcaatatagcatcgacggccgcgagggtatcaggtgaaaccggaaaacgagacgcctgcgcagaaagagcttctaattgctgatagtgaacggcctcgacggacattaattccttggccttcatttcccacgcatccccgtgacgagcaagttccttgaaatgaattaagtgttcgttggtatcagagaggccgacctgttcagcaccagcgacaagttcccggcaatcggtaagggtcatgtagtggtctcgtttgcgcacggcttgttcaatccatttgatttggcgggagacttgctctaggtgttccagttccgggacttccacgttgaagtttttgccgcgttcgatgagttcttcaatctcctggaggggccgggtgtgcgggtgcatgagggcattattaatatcctgttggaatttctcgatttcgcgggttttctcttccaacaccgccatctgtggacagtcgaacgaaagtttatcagcctctgcctgaagggcgtagatatgttcaattctgcggacttcgcgatcgcgatcgtccagctgcgacgccttggtactgcccctgcgccaagctttctcgttttttttccggttctgctgcttccgggtaatgtagttgttggcttcttcaacccatttatcgcaacgctggacgaaggccgcaagatcttgaaggcctggcaagtggtatgggattttctcaccttcatttagcaagttatgaagggccttaagctggggcttcggttcatcctccagggttttgtcgagcttttcggaccatgcttcgggaattctggcccgttcttggactttctgcacgagagactgcaattcttcatcacccatgcgatatcggactgtgtgtcctgagccacacagcttctgagcaagagtttcgccacagcagtcataggtgtcaacgtgcgataaacagacagtcttgcctgatttgtgacaacggaactgagtgaggtaagcgtaggccttgcaatgttggcactggtaatcatcctcggaaaggtcttcattctcaactacgaatctcggctgcacatcatctgccatggagtcaggaccaaagcctggggtgcgagcagaaatttctttttgccggtataagaaagcagcccgatccctcagttcacgggcgcacgttcttgctagtgcaggcgcaagccacttagcagtagcaatagtggtatcacgtgcagcagcggtgagaagtagttcatcgtgggagaaacacgggtgcctgcggaagttctgaagacgatcaacacctgctgcaccgtatggttcccagtccgcaggcgcgaagttgactgcttcattgaaattaaaaccgtgattaaagccggcatggtatgcttgagggaacgtgagcacaaattgaccagctcgctgatccaacgcataaacgttgactccggccttgcgaagcttgtctggcggcatgagggtgacgagctggaaaagaagatcaggctggccttcgaaaagctccggaactgcatcccgcatggccgcctcaaaggcctctgcatcggcgcctgggattccgtaccaggtcttggtagcaccgaagtgttggtagttggccgaatacgcgtagtgatcctcattatgccagcagaaagtagagaaacacatccccacataaacccacggaacggtcatgccagagatatcagacttgatgtaacggaagagcgagtctccatagaatggaaggacatttaggttccaaggatctgacgaaaatggatcaagggggttccgctcgatagttgggaatccactaccatgcgtggtcgaatggatgtcggcgccgtactcgacttcgacggtctcatgtagatcaacgacaagcttccagaattcggcctccacgtcgtcctcggtttcgcggcgatgagtgttgagaactggatcgaagggcattttcgatgcgaagtacttcttcttgaactcgtttgccttctcctggaactgtttgagtgagtaaacaccgccgtcttcaaatccgaattctcctgtgccgactagacacttgggacagtgccagtcatgttccgatggtgtggtagtagagggatcgagacacgctttgtggtatccaagctcgcagccgtcgcatactagaataatcccttgatcatcggatttgccacatgtctcgcatttctgttcatggatcagtatatcatcagaaccctgacacgaacccccgcctacctctccagctggctgggagccatccttgcgcgatttaaccggtgctgggcgaaggagcgacatatgagaaccagcaacggttggaagggaatctagaagggttagacaagatttgcttcgaatattaaaagggcaaaaaagcgtacctttcttggggcgcttgctgcgtcgaccgcttccatcatcgtcgtcgccattttcacactgagaactggcctcgcggctgataccacgcttcagagactcctcatcttgaccatttacaggcgttgagacgaaaccatgctcggaaacgactttgggtgtcaatgtgccgttctctccctcccgcttgattggcgggccgttgttcacgggcgtgaaaggagagtgattgacagcggtaaagccaccgaggccggagttgacgggagtgaagctcgtgggtgctgggcgtgaagcagggggaggagtaggttcgatcgggggtgttggcttctctggggacttttccattggagtgtgtgccattggagaatgtgccactggagtaaatgccattggggtatgcgaagcagccattcgaggcaagctaggagtgtcatcgcgaattttagaaggcgtgccattttcatccaacattggcttgtgagtcatgggggattgtagaggcgaaggggtgtatggaccaccatgttcaagctcgagctgttgttgcacaccgggcttggcccgcgccaggtattcctcgtacggctgcaaataccgctggtatgagttcttgagcgaagtggacaaagaagacattatcttgccgctgtatccaagatcacgaccaatttcggcccattttttggtcttgcacactgattcaaacccaccacgactctctactgcctttttaagtttgtagagatctaatggtcgcttgtcgacgctgggtagccggctatagttagtcccatgctgtttgtgaaacatggcaagtccatcgacataattcatgttcgcgcggtttcctatgttcgaataagggttagatccgcactgcggtgtgatcctaccagctggagtaagctgggcgtggggccttacctccttcgaccgaattcagctcttgtcgacgtgtcttgaagtggaatcgctatatccattgtcagacgtgatcatgcgcggaaagcgacggtgggccggtgaaggagggatcctacctctgtatcgattgcgaaagtcggttgccagccctctggtggaaccactcggcaaattccatacttcttcccctccggagcgatcttctgaatataggccaccgggtctttgaattcctcctctgtcggacggaaggtcggggcttctgggataccatgaggacgaatgcgcttggatggttctctggggttgttgggctgtccgcgccgttccacggtggacaaatcgagaggtgtggacctgcgagcgctcaggggcacgttgtgggagtgcgacggatgggtactcgaggaccgagtcggctggcttgctgcggccgtcgaagggggccccccccgggnnnnnnnnnnnnnnnnnnnnnnnnnnnnnnnnnnnnnnnnnnnnnnnnnnnnnnnnnnnnnnnnnnnnnnnnnnnnnnnnnnnnnnnnnnnnnnnnnnnnnnnnnnnnnnnnnnnnnnnnnnnnnnnnnnnnnnnnnnnnnnnnnnnnnngcccgagtcggctggcttgctgcggccgtcgaggtcgccccggcagaggccggagctcccattgttcgaaatggggcaggcgattaggggatatgtttgattgagcgcgcctgtttgaagaaattcgattaacaatgaccgtaatgcgtcaacggcagggcgtgatgatagatatcaggaaaggcggctgccggcgttcctgtcaatatgaccgaagggtgaaggatcggtaacgaaccaaaggatatgagagaatggatattgaggacaaacgaaaggaaattttgactcggggcgaaaggcaatagaacaagaaaagagaggcccaagtcgcagagaggaaagaaggatagatgggatagaaaccttaagagtggaggaatgagattatgtgcagtaaagatcgactgggggtggtactccggaagtactgccaggttctttttgtgtggccagccagtacgaaaggaaccaatgagtgactccggggggacctgccaccagccgcgatggtaccgatcagtacggtaaaggagttactgtaagaatgagctaatccgagctcaggaaccgcctgtaccctgactttcacgtgaaattttagtaattatactgcaatgctgcaaacggggatcatacggtgtctcctaaataatttcgtgtacggaccgcagtatttgggagcccaatgttacgccgtagacctatggtgtatggtggatatccaaatatagtgtcttgtgacatattaacttgatagagggatgtgcctcggatactggcgaaatattacctgcgtatagactttgtttctataattgcgatgtttcaataatggcttgatatgtattttattccggtttattgtctttttgatatcttcaaatgtttatcaatggagttgtgacatagttgtttgtgagactttcagtaggcattctttgcacatcccttcgatacacataactatcgtcaggtaagaactccattacatatgtaagtccctatcatccctagacagcaatgcaattccatttccccttagaggggaaaaaatactttatcatgtgatctgtatatcacggtaccgtttggacccgcacgtattcgataggcagagctaatttcaaggactcgacaagccgacaacattgaattgaacatttcaatgtcaaaaactaaaaaaattcctccaaatcaaacatcatggaggagtctgaaacccctaaaccaatcccggcatattactgctgttatctcctccggtcaaccgttcgacacgcatcactatatattggctcgacgccaaacccgatcagacgactctctcagcacaacggtgttgccaaaggtggggccaagcgaacggccagagataaattacgcccctgggaaatgaccctggtcgtagagggtttcacgagcagagtcggcgctttgcaattcgagtaagtcgcatgtgaattgtttgtatatatcgcgtctcaatttctcattgcgcgtagatgggcttggcaacacccagaaaggtcgcggcaccttgattccgaagatgatctagactccaagcctcgggctaaggccaataccgatgcgaagacgggcaaaccaaaaccgaaacctaaagcgcggactaggagatccctaacggcgcatttggaggatttgcattctctacttcgttcgacctatttctcctcttggccgttacgagtccgtttcttttgtgttgatgtatatcgtgtatggcgagcctggaatgaccgtgtgaatggtcgcttacccgacaacatcaaggttattctagatggagacaaccttacaaaaccgcccggtccaaagcaaggcgacgagttcgcacccgttggaagcattaacagtttatcaattgactacaccaggatagaagattatctcgaaaagtcaatgttcatgctggaagacccggatgatctgcagtgcacggtctgtaaagagtcgatctctccggacgaacaacaaatagttgtgtgtccacacccgaattgccgcggcacaagccatttattatgtctatctaccacattccttgatgcgaccaacggaccagacctcctagtacctactcatggaacctgcccggcgtgtaaaaacaccgtccagtgggtggcaatgatgcgcgagctaagctttcgcaacagagcagagaaagaaacgcgcgcaattctcagaaagaaggagaaacgtgttcgcaaagaatctgccgccatggaggtattttcaggatcccggtctgctattgaaccaaggtcattgccggacgaaccgacccaagacgacctagggccaaactggttcgaggaagtcgatatagaatctgactcagatttcgagggtcgacaaaagcgccgcccgacccaacctccatcaaagctcgagatcgtgatcgaagacagcgactgggatgacgcagaaatcattgaatgaccaaaccaaacccagttttatttctaattccttaattcgcaagaggctctaatttcctcaacgcgcccgtctcgtccagacgtgcaatgcaacctgccacagcactctgtatctcccgtgacacctcatcaatggatttccccgcatcgataatagacacatcctgctgcttctcgaagatcgtccggaaaagctcccgcacgcgggtttgcattgcctcgttttcatatcgctcggcaccgaacccaccacgttttgctgcttcctcgggtgaaatgctaaggaataaacatatatccgggcgcggtagaccgatttctggctgccatgcccagtccagtgatagtgtggggttcgctttcgcggcagagtaaacaaccccggaatatgagtagcggtctacaatgacggttgttccgtttgtgatatcttcttcaatgctccttgcaatttcccaccggttcgccgagaaaaggaggtgaatggaatggtcgtcttggtgggatgtgccgcgtagatagctatcaatcaacttcccgatgggcgtcgttctgtctagaggagattattagaccaatgcacccatagtaacgattaatcaatacctgggaatcgaatgtatttaaccacatgcccctgctgcgagagagattcccgtagcatctcacactgactcgatttgccagcgcggtcgagtccttcgacaacaatgagcgctccgcgtcgcgtcggcggtgctgatgggcctgtcatgattgactggaatacaggggtgtgattatatgtaaatatctgagagttgtaggtgaggatcctcaattcctagtgaaatgtgtgaaatagcccaaatgtttccgaaggatagcgagttcgatgtttatcgggaaatccgatttcttcgataagaacacgatctgtccaaacatggtctctcaataaccacgaacgccatggaccaagcgacgtccgcgtccccagcgatgaccttcagcatcctggcatctactgctccaatccttgccccgcgagtaggaaaattagccattccagggcgcaagaccctcgcaacgccgcaccatatcccgctcacttcgcggggcacagtcccacatgttgcgcacgatgtgatgcgcgaccacactgagatcaacagcttatatgctggattagaagattgtaagatgaatactccgagatggctacaagtctgttctcatcaatagctgacagcgcatgcccatcgggcatataaaagtcatcgcgaaaaaggaaccctcggtttacaggacaccagtcgctgatcacgagtcgcccttgaagaaattcatctgtgtggctgaggatatgcctctgatcctaggcccgcgtcgattccctccgatcccatgcccgcccgcgaacacaaacacttccatcgcgctgctaacatcggtcgggttcacccagttatctgcgcatgattatgtgaaggcgattcagaaattgagaccagacattgcggtcgggatggtggacctggctaataagcagcctgggtctaagaggcgagggaagatggttgaccggacgcatgcctggacacgcgatgcattggagcagctctacggggacgctgtggcagagaaggacaagtcaaagagcgcatacttcgcaccggtactgcctcttgataatgcgcagcagtctctctatctggatgatttggagagcgagttccgctgggatatatccggcctggcgctatatgagtctgcgtcactggaattcgtcccagagtcgctggcgggtctgcctcggttgctcttcagcgagcccgagactccccacactatcctgcgtgacatatcccttggggcagacctcctgactacacctttgctcggcgcgtcgtcggacggcggcatcgcgatggaattcgtcttcccagctccagctgccctgcaagagggcaagtctaagcctcagcctttgggaatcgatatgtggaccgctgatcacgctaccgatatatctccgctgggcgagggatgtgaatgctatacctgcaagaattaccatcgtgcttatattcaccatcttctccttgctaaggagatgaccgcttgggcgctccttcaagtccataatttccacgtcatggataccttcttcgcaagagtgcgggatagtatccaacatgggtccttcgagcaggacgtgcagacgtttgctcgtgtttatgctccttcgatgccggagagtagtggagaaggtcctaggtatgtcaattgccaattttcaatgtgtttttatttcaaatcactaacggtcttgccagattacgcggttatcaactaccggccaacgggcctaaccagccccgacgcatgcccaagatatatggcgctcttgacgatgctatacagaaattcgccgatgcccagtctgaaatcgctaccccggacaccgacgcgagcgggctcgaggaacacgggtttgctgagaagttgtgatggcagcggggagaatcgcctccggcaaacgcttgcatgagaaacggtacgtatttatggaagcatttgcttagcaattagcgtatgatatctatagatcaacacaaaatatatatactggattgttacaggggcccttctttggctaattcgacccctctgtcttacacataaggcatcaatttcaatttaccagacttaattctacacttttgaattctactttacgtacgcggtagtcaaaaatcccttaatgatagttatggcggtaagctgaatcctgaaaaaccagacagaggggggtaacaatgccctataaaagcaggagtgcacgcatattcataatattcatctcaataggatggggtcaagactagtgtacataaatccagattttgtgccattcttagtctatatgtccaggcttgcccccattaaacccccaaccgtcaaccgtaagaacactagggtatatctttatcctgatttgtagaaagacgcattcttaaacctcctcgcccgccaagacccgccacatccacttgacctcgtcttcctcctccttggagccctgcttcgtaccggcaccgaattgctgaccgacaacacacacaagccaagcgtcgttcttggtggtgtccaggtaggtttcggtgggcgatccgcgggggtagatgcgacgccattcgtcccagattcggaacgcctcctcaccccacgcacggaaactcacctcctcgatgatcgttggggtgacgatctccttaccgcggaacacaccccaggtaacagcgttgacactctcggggttggaggcaaggtcatcgagttccatatctgcaggctgggttgggagcgaggactcgaaatcgcccttgatgtttgtggcgaaccaggtgagcttgtcgcggccgtgcttagcgaacattggcttcaggatattggtgtagtcgtcgttcgagcagaagaactccacaaatggcttctggaagacgaagccttctcgttggggaccccagccgaagatggggtggtcattgtgtacaccgttcacagcgggctgcgaggccagtgtccaccagccgcggccatcaatgagcttcaacagctccggtcgaatcagctcagtctctgcgttcaaaccctcaccatcctcttcggcaccaccctctgaccaagggaccatgtgtagctctcccgagacatggcgacggaaaagggtgctcatgtccttgttgtccaccgggtggccccatagcctacgtgcggagttggcagtgacatggagcgagggaccatagccgtcgatctcaccaaaggcaggtgagcgagcatcaccccatcgtccgttggggaagtcatcccatgttgcttctctgccaagggcaccgagaccctcggagatgagaagagtagtactgcggtttggcgggggtgcaggcacgcctgcgctatctgcgcgggcctcgtggacggagtcctgcgatgacccgtggaccgatagcttgtcgacaatgacgcggttgcggggttgcgagttcatagaggacgcacggcgtctgcgcgaggcacgttcagcgaaatcgagtggaatcgatgcaggaccatcctcgatagcattttccccagcatccgagtacgacggaatcaaatcgcattgttctaggatgaatgatactgtcttctccaagttcaaggtgtagaaatggaatcctcgcggtcccggggagggaagctggctcataccacccacaatctcgctaacaatatccacacccgcgcgcttgaccgcgtcgtcgtcgtgtttcaattcttccatgcgtttggcaatgggaggtggaatcgtgacatggctgagcttagtcacgcgggtgagaatcttatagctgtggatgggcatcaaacccgggatgatggggatagtcttgaaagcaccagactcatggttgcgaagcatgtgttcaaacttttggtaagcgtcgaggtcgtaggtcagttgggtcatgatgaaatccgctccagccagtgtcttctcgaccaggtaaggtatatctctggccggatcctgaacgtcctggaacgtgtcggcgggatggccctccgggtatgcggccacaccaatacagaagtagtcgccatgtctctggcgaatgtatcgtaccaaatcaatggcaaaagtgaaatccttgttgctatcgtcctctccatgcatgttatattcctcgctgcggggcggatctcctcgtagggccaggatgttgcgaattccgagaaccttggcctcatcgagagccatatccaccagctttcggctcatgttcgtacatgtcagatgcaagacggttgtcaactgcagttggcgctggcatacttccgccagctcgagcgatcgtgcggcagtgctaccaccggcaccccaggtaaccgtgacgaatagaggacggagtgcttgtgccatccgctccagacgcgcggacaggttggcgaagccctatagtaggccatattagcaaaatatccacgactgttcagcaggcggggtaacccccaccattcgggtctttggagggaagaactccaaggaaaagtagttggcatctggcggcagagccgcgatcttctcggtgatcttcttctccattgcgtcctataagtgtatgggtcggcaatgggaggggttgaatgaagaagagaggattcggggcaaaagtggaccatgtcaccatctgctccagtcgcatcgggaactatgatgtctacagctgccgactggccatcgtgcatgaaaggtctactgcaaatacactacatggatttaaaggcttaaatactgttcctatgcaaggagtaactttatcttgatcccgaagagctagagaaaaaaaaaactgacagtgcaagagatgactcagcgagacaatcgttatttttccccggggcccgaggtctcatcgggatcggcgagcttaatgcgagcacttgtttagcactcatgtattttggcgtcggagaaggcatgatcttttgaacatatgtagtctctctttttgaactccacaagtttaccaattcattcacggaaaaatggcctcccgaccacccaacgttctccgctatctccgtctccaaacaactcgacacgctaggtcgcatgcgtcgcgacgaaccatttccactccatcccctccacagccaccgaaaccgtcacagccgatccctaatgactctcactctcgcctgcgtcggctcaacgaccgcctccctcgctttctccgcacatacactacacccttattaggggcgccggtcacccatatcacttcattcctaatacttcatgaaataaccgctattgttccaatatttggcctggttggtgcatttcactatggtgtttggatgccggatcttgcatcgcagacaggcgagaccaatgccttcgacgaaggagctgcgcgtttcggccgctggctgaaaaagaaaggttgggtgaatgagtccgacgtgaatactgttgccgatcatgaaaccactgcggagaagactgtggaccgagcaggtgttcgattggtgctggaatttgctacagcctatgcggtcacaaaagctttgttgccagtccggttggcagtgagtgtttgggcgacaccgtggtttgcaaggtcggtattcacaccgatagcaaagctagccggacgtctcttcggcagaggatgagctagtcgagcactactactatgataccagagagaagtatattcataggtctatgaatttgtatactgtgtattttgtcaagccattggacttcttcctcagaactgctgctttacgctatgctacaagtgtccgaacaagaaatccgcccgactagtccacttaaaggcgaagaatttattcgtaaacccaagcggcctgggcggaggtgtacttgaggacctcggaggcaccgaaccagagagcaatctccttcttggcgttctcgacggagtcggaaccgtggcagacgttgcggccgacatcctagtcaaattgttagtatgtaatgacacgatctcagaacatacggggttccttacgatggcgaagtcaccacggatggtaccgggggcggaagccaaggggttggtggcaccgaggaggacacggccggtcttgacagcgtccttaccctcccagaccatagcgcagatggggccgctcagcatgtctagagctgtgttagtgtatctggatttgcggaaccattcggacgaggaaactaacaggcgacgagacccttgaagaaaggcttggtggcgagatcagcgtagtgcttctcgaggtgctcctggctaggggaggtgagcttcatggcaacgagcttgaagccacggttctcgaagcgagagatgatgggtccaatgaggccacgctggttgatgctgttagtaaatgtcgttcaattgcggagctcttccgggtccgttatgggttcaagtcgaagggggggggtgtgtccgtacctggacaccatcgggcttgatggcgatgaaactagagcaattgattagctttaccggcagcgaggggtaatagcaatcgaaaaagaagggggattagggaagactgattttgaagcacatacgtctgttcttcgttggcggacattttgaatgtatgagaatgataatcaaagggtatggagtaggaaaagagagcggaagagggaaagattaaatagaggcttttaaaaaactcgggccttcccacttgggccgttgattggtggccggaaaggaggggtgttgatgcccgatgcctgaattgtaaggcatgaagtggacttttgtaactaaatatactcttttcactcttcgcttcatggacccgactacgaagatgaaaacatctatcaactcgaaaataacagttcaattctaataacagcatctaaattcaagccatgattccttcaaataacgactcgcgtctagccccgtccccagccgtttcccctggcaacttcccctgaacttcagcaacgtgcaatctcccaactagctcccaatttctagtttcaagaccctctattcttcgatgcagtagaataatttcttgcaagcctctaagtaaatgaacagcggctgctagggggagtcgccgttttcggcctctgtatactttgcaaacagctaatcgtcagggcaaaagctgaggggagatccagctcgacttagctggcattacaaataaaggccctccatccacctgaaaagcaaaatacacttagaactatgtactcgaagtatatatgtacgggttcaccatgtcaaatagggagaactcaggctttattatctcggtctgcaaacataacgttgtcttgacgaagatcgttgtggacaagattcagggcatgaagatgatcaatgcctgccctgacctgctcgaggcagctttccttgtcgaccgagcgcccgtccctcaggcggtccccgagcgtatccgcgtgtttttggaagcagagcccggtgatccggtcgtctttcaccacgcagccaagatagcaggtgacattttcatgtgggtgttccattgggtattcccttaaaaactggcagatatgcgcttcctcgagcaagtatttgctgaatgcctctgatttgtcgtagcgagtgagctggggctgcttgatctagacgtccggactgtgagtgtttttgtatattgtgaggttatcatatagccggggccagatgtgctctggtgggatcttctggaagagtgattggtcgatattggcggggttctccagaagatgctcctttttgggctgatgggaccaaaaatagtcgtcgccatcctggaagataacgatcgtgtatagaaattctgggataccgctgctaaattcccaggtctctcccttatcgtaagatctcattttaataagagaagactattttttcttgaataggatttcaagactgcgaggcaatgaagaaggctggattacaagcatggagcccttttcttaagtgctagggggcgctaggtacggaactctgccataagttgtaaagtggaccaatgaagtatcaggtgatagcgtgcggtgaatggcaaaagtgagatattccacagaagagtgatttataaaatactgcatcccgaaccatttatctactacctacgcgcatataaccaaaaaagatgagtgacatgctactggatctaataactaatcctgacaagcattctccaatggaccaaggcttttctatagattcttgaaaatttactgggtggtggtcaagatcaaaacaatgctccgaacgataaggctctttgtcggcccaagatattgagttcatgactttgtcgttgaatcatacttatctctccgtctcccccttctatgtagatgatggtcaatgttcttttcctttttctttagagtgcaccatcgtaacacgcctgaaattcgtttagtcatttagatacgtgtactagaacttctaggatttgggatacttttcgccggaactcagtaagtccttgcctactttgctaatcaagctcgtccaatttatcgggcaaaatgcctgtgaggcgctgatgcgatactcgcccttcacaccatgaggtctggtctcatcatgccccctacagcccgcagtgggtccggggccccacttcgggttagtctaaaatctaggacagcacacggagtactgttagtttatgcaaatagtggctgtaatatagaatattgagcttgcaatatcacaatagtatgagcgagcagagatacgagtacatttttccattttaaaaactacataataagtacgtagtacaaaagacaaataaaacccagaaaaaaagacaccaaaaaggccacacacacccagttagcataatacagtccattatattgctcgctcttctcctagcctcatatcaagtttcttgcaggtagctccatattcctacctcatagtgcctaggtgcagcttttgtatggcctttagaatacctttgactgttgtgtttgaaaaaggaaagaagaaattccatatagctgagtgaccttgagacattcattaacctcacagaacggtaaaacagaacggtaaaatcacaatgtccatactcacatgtatgtctctctcaatagaacccagcagtcttcaaagatttccattcggctgcgacgtccaacggtccccgggcgatagagtcaccagccaaatcgacaagaacatactgcttgccggagaaaaagtacgcctgaagtttgctccttctcggcttaaacacaacagtatcgattgtcttgaaattggcttgtgccaaagcattgaagcgcaacgcgatattacccgattccaagagtatattccggttgacatcaattaaagcgtacctgtccttgcggaagaaacatacgacatgttgatactcacttcctttgaaactgaaaggcaatgctgcgtccaccaggtcaaagcccacatctttcaggccaggccatttctcctggaacctgaatggagtcaattgaccgccactgggatgtccggtcttagcattgagtctcacgcaacgagatccacagaaaaagtatgtatcaacttcgttgtctgttgcaacgaatgcggcatttatcggggcaaatccgaatttcttaagcccaggccaccatgaccaaatgtccctaggaggacttgggtcgatggtatctgtcatgacattgacgcgggcatactggtgatccttccagaagtaaatctcatcctctgaccatgtaagtgggaaaactgccttggtcgagccggagaatcctagaagtcccttgacacggtctagagggtcgactcctactggaatagtcgagtacaggacctctccgctcttcgtaaagctcctgatgacctgctggccaccatcatcccgaactatccagtcggcaaagtcgttcgccgttgctttgtttttagcattcttaccgaccagaatgtgagcagggttaagtagaagatcgttttcgtcgttgtttccttcggcctaaattggatgttagcatgtaattttcgatggtacatttccgaaataattacaaagattgtaagttgttttctagtctcatcttcgatcgctagccaagtctccttgtctatcacggtgtattcgcctctaccggccgcctcacggatagcttgaaaggggaacccagggaacatgtgataccacgaggttggaggattggcccatggaacctggccaatcgtggcccagagcagagactctatgatgtttccagccgatttgtcataactgagtgaaagcaaatggttagttagtggatgccaaatatccgatgatcgggaatgaaggaccagcccgaatacctaccgcgacaggaacttgatgggcttcgctgaattcttgctctcttccattcggctgagcaacttggttaacagagaaaatatactggtctgtctatcctctgggaggttagcagggttgcgttttgggcctgcagtattcaatacataagattaaccgagacttgaaatgtttattggagaggatgaaaagcataccgacaagcatccaatggtcccgccacgcgtacacgactcggtcaatgacattgtcatctagcgcattagacgtgatagcgatatccgcggtctctttgagcagattctcaatcgaagaagtggtatcagacttgtaccattcaataaggaaaggctcagctttcttgttatccacacaactattggcctgtaggtgagaattttgaagctttaaagcattcccgcacacattttttgtcttgggcaaaacttactattggacaaaacttattgccaaagcctccagcagaccagactgaccagctccgccagttgcaatacggagaagaaccttctccttgcgggtgctatacacggcagagggagcaattcgttcagccatcatcggaggttagtgaaggaatagtcaacaaattcaaatgatattgtacttgttcttttctaaaatctgcagatatagatcacaaaggtatatatactctgtgccggtcattggtaagataatttccctcgtcgaccacaggggctagctgatgttctacaagtcgaccacagtggctggctgatgttctacaaatcgacaaaagtggctggctgatgttctgcaagtcgaccacgttggctagctgacgcattgacgacatgtctacgcagcaggatagtggatctattttgactggcagggggcagttcacgcagccggtggcccacttaaatcacgtgaaacatccactgggtgagctcacccggcacttacgagtgatctcgccggcctagatagtcgttgccgagcaaagcgactgattctaacttctaatgctgtgcaaagccccctcttactggcttattggcttcagaacgaccccgcggcttgatcaactcccttgcttttgtcataattctaggagaaaacttggccacgtgacacgtacgtaagaccttctgatttagttatagtttacttgcttcgcttcgctccgcaattattgcacagatactgtatgttccatgaatgtatagaataacatgactactgttaagttcttaaaggtgttatccctccctgattcgcctcggtggttgatgggaggtattgacgagaaatgattggtagaagtttggtattgttaaggtattgattaggccatcagtcacgtgttttaggtgggccactggttgggtagattgagtaggcgagcagattctcagttgctatctctgctcgtatcttatttttgtgcattgaattgtatgacacgtcatcctatattgcagctaggccgaactgtaaaatggtttttatcacctattcccgtatatcgagaattagtaaaagagagtagaagtacaaaggaagctactggcatggcaggcatctctaaatacgttccgacatcgggctctcctatggagactacactgaagtattggcgccggttgcatagatttgcatagactcgaaacaaacgtttagtcgtcaacatgtaaggaatggaaaatgaatcacgacagaaatgggactaaatcatttcaggtgtttgttcctactcaacttctgggttcgaatagaatgccttaatcttcctctcagcataagaatagtccgctttgacgtcctcgagcgcctccacaatccgtctcaagcatagctcagaatcaggttcaggtgagccgtccaaatcttcgttcattccgtagtgctgaattttttcgcagcctttctgcactttgacaagccctatagttgctgaagaattttttaaaaaatgggcgagttcgtttatctgtcggagttccccctccgttctatattgatttaaagatccgtcagcaatccatcataattgattattattactcaaaagccccgtgcataaaagtatcatttcgtacaaaggttcaactttgcacatttacttctagcaaggtttcacgcaaagttccagtgagaccgaaatagtctcgagaaacagaagggcgaacttacattgccaaccccattcgttcaaaagtctcttcaacttgctcgaaaaagccatagcagatactggtgctgaactctctatcgtcggggtcatcgtccatttccagaatctgacagaacacagaataatccactgcgtcaccgaagctgtcctccaagtcctggtaacatggttagcaactaaatccgagggcccaaaaaaagacaattgacattgaacactaacttttcctgtattggttgacatggtattcatttgtctgttcgtaggtactgtgtgttgtctggagatgactgaagattgtaggcgagagacgagtttatgtagacagcaaaaggatcgaccagtctgtccgagtgttcagcttcaacgtcaccgagtcgatcattgagtcgatcagtgttttcagctaagagacgatcacatattgctttttcgggtacggaggagcgagataccgcacaaacccacaattcgacttcgttctcgcttcatggtgacaggcgattatgtgatctctgaatagcttcatactttcataatatggggctgatcgtagaagtactacatatgtggctggtgtcagtcgaaggctgtgctttttatactagtgtgataccgtaagtgccaagaggtactcggcctaattagattagaggactgtggcagtagtgattcgggctgtgccaacagtgtttaccttctatgcatgtgactgaactaagcaagatctgctagttagttaacatctaactaccagcctgagcacggcagatcaatagaaaagcggtatagtcacagttatgtggtcatatcgcgaacgccgattggttcaaacgcaaagcaagttgattggctgttcagaagctgtagtggctgccttgttgccttaggggtcttaccccagctcaggccagctcagcttgtagcttctgttgacggcatctccacctctaaatgcaggtcaatcattgataaccaacgccactctgtcggagattgagggtctctgattgatcgtactatttatttcaccatggccaggagtctacctgcgccccgttgggcaatgttgctctccctggttatccttctcgtctgcattgtggtccccggttgtaaggttgccttttgccaaatcgcaagattacagaaagctaactcttatgctacgaacagttgcggtcaaacacaaggatttcaagacttgcgatcagtccgggttctgcaaacgaaatcgtgcctacgccgatgacgcctcttctcaaggcacttcatggagctcaccttacgagctagaccccgccactatacatttcaaggatggaatgcttactggagtcattttgaaaaccacgactgccaatgaaaaggtccggctacctctcacggtgtctttcttggaatcgggagcagcccgcattgtggtggatgaagagaagcggatgaagggcgacattgaaatgcgacatggcagtcaagcaaacaagaaacgatataatgaagccgaaaaatgggctatcgtgggtggtttagaagtcagcaagtcggccacgttgaatgcccagagcgaaactggattcacgaacgtcttgtacggaccggacgacaaatttcaagcgatcgttcgccatgcgccatttggagtcgaattccagcgggatggacagacccatgttcaattgaaccaccaaggcttcctgaacatggagcactggcgaccgaaggtagatgccgaagacggcgaatccggcgaagatgagagcacctggtgggaggagacgtttgggggaaataccgactcgaagccacgtggtcccgagagtattgctcttgatattaccttccccggttatagtcatgtatttggtatcccagagcacgcagattcgctctcgctcaaggagactaggggtggatctggtaaccatgagaacccttatcgtctatacaactccgatgttttcgagtatgaactcgaaagcccgatgaccttgtacggagccatcccgctgatgcaagcccaccgcaagagctccactgtcggggtcttctggctcaatgcagcggaaacgtggatcgatattgtcaagtccactgcctcctccaaccccctgaccttgggcgcccgctccaaaacagacacccagactcattggatgtctgaatccggtcagattgacctgttcgtcttcctcgggccgtcaccgaatgatatcagtaaaacatatggtgaactcacaggatatacacaattgccccagcagttcgccattggatatcaccaatgccgttggaactatgttacggacgaggatgtcaaggaagtcaacgccaaatttgacaagcaccagattccatacgatgtgatctggcttgatcttgaatataccgatgaccggaaatacttcacctgggaccctctcaccttccctgatcctacgggtatgcagcaaaagctcgatgaaagtgagcgaaagcttgtggttttgatcgatcctcacatcaagaacgcggacaagtacttcgtttcagaagagcttagaagcaaaaacctcgctgtgctgaacaaggatggcgaaatctatgatggatggtgctggccaggttcctcgaactgggtcgactgctttaaccccgctgcacatgcctggtgggccacgctacacaagtttgacaaattcaagggatcgcttcagaatcttttcatctggaatgatatgaatgaaccctctgtttttaacgggcctgacatgaccatgcccaaggacaacttgcatcatggaaactgggaacatcgcgatgttcacaaccttaatggtctcacccttgtgaacgccacctacaaagcaatgctggagcgcaaaaagggggagatgcgccggccattcatcttgacgcgctcgtactactccggggcccagcgggtgtctgctatgtggactggagacaaccaggccacctgggaccacctaggggcttctctccccatggtcctgaccaacggtatcgcaggcttccccttcgctggcgcagatgtcggaggattcttccataatcctgataaggaccttttgactcgatggtaccagacaggtatatggtatcccttcttccgcgcgcatgctcacatcgatacccgtcgccgtgagccgtatctgatcagcgagccccaccggtcctacatcgctcaggcaatccgtctgaggtaccaactgatgcctgcttggtataccgccttccacgaagcctccgttaacggcacgccaatcgttcgccctcagtattacatgttcccagaggacgagcaaggctttgccatcgatgatcagctgtaccttgcttccacgggtcttctcgtcaagcctgttgtgcaggagaacacgcatagtgcagaggtatatatctccgacgacgagaagtactatgactactttgatttcaccgtctaccagggtgcgggcaagaaacacaccgtccctgcgccagaggacaaggttcctgtgttgatccagggtggtcacatcattccccgcaaggaccgtcctcgtcgcagtaccggtctgatgcgatgggacccgtacacactagtcattaccatagacaagaatggcgaggcggaaggcagtctgtacgtggacgatggcgagacgttcgactacgagcgtggcgcctacattcaccgccgcttcaactaccgcgactcggtgttgtcgtcgaaggacattggtaccaatggacctaagactgctgagtacctcaagaccatggctggtgtgacagtcgagcgggtggtgatcgttgaccctcccgctgaatggaaggctaagaacatcgtgagtgtcattgaagatggagccaagtcaggctctacggcctccttggagttctacgagcaggaggccgggagggcatcctatgttgtggtgaagaagccgaatgttggtattggaaaggcatggcggattgagttctgattgatatctttcatttcttgcacaatacatgtatgcaatattcacgtcattagaagttgataagcctgcatatggttctttatataaaattgtccgatagggaaaacttaccccttcacaaaatctaacgccatcatatcgaggattacttctgatgcacagattctcacgcagttgttcatcaagaaaccttccagctttgaaattgagatatgcaacctcaatgctaaaagtttgtcctcgcgccgggctgtggtgccaaccgctgccgagtttatttagagtttctttgatgctttcgatcttcctatcgccttgtccgaagcgggccaggcgagtcaagctatcgaatgaccagcccaagccatgtgcggaattctggtggtcttgattatactacggctcgtgcacaaccatatttcccaccaatagaacgatatgaaattctaacgcattcatgtgcatctctcttgttgcagcttgagacaggattcttgagcagacacgacattgagcactatatcatgccaagttaacatagggcttcttggtggaaacatccaaacaagctcgaatgccctcctttccggccagaaatgtgaaatatgtcgcagcttaccatatgtccgaaggagattggagcagatgtaccggataaaggtccggagaaaggcctggagaagacctggagaaggcccagagcaaggccggagaaaggctcatcattgcacaccccgcatgccaacccacagtggttgtccgtgctttccgcagcaggtcggactctgactggatgcctatttacaagctcaccttggcaaagaccactattggtcgcccccacatacttctgggagtcactggatcacgcccttcaatgccaagcttccccgcatttcttggctattggaacgtagacgccaagactggggtaaacaatggcatctgaaatcattccgtcattctatttaggataaccgacatgatataactagctatatccctcgtttggttgacgagactctataagtacaggaccctcgagcgtggtagcaacgattgtatactaccaatccacagctatgaaccgcggctctatcggaaaagacgatgtcgagattgtcgatcaaactgctcatgtcgaacacattctcaagccttctcttgtcactcagattggagactttcgtgtcgtcggtttgacccccgaggatgcagatttctataacaactatccggaggacaaacgaaaaagagtcttccataaggtggaaatactagccattctcatgaatatccacctgactctgtgtacaggtcgataagcgtctgattcccatgcttgcagtgttatacttgatttgccacattgatcgtgcgaatatcggcaatgccaaaatcgaaggcatggtccaagatctcaagatgactgggttgcagtataatactgtactgtctatatgtaagttcatttcctacagccaactcttttgtaactgatgtgtaatggctctcaatttagtcttcattccctacgtcgtgttggaagtccccagtaacatccttctcaaaaggttcaagcgtccttcggtgtaccttggacttcttgtctcggcctggggtattgtcatgacatgcacgggtctggtccagaactttgctggtcttatgaccactcgagtcctacttggtgctcttgagtgagtgacaatgatgaacccctttctgcttcgcattctaaaatccttatagggctggtttcttccctggtgctatttacctttgctcctactggtacatgcctagggaattggcgcttcgtatctcatatttttactgtgccagtgcgctctccggtgcattttccggcctattggctgccgctattgccaagatggacggtattgctggacttgaggggtggcggtggatcttcattctggaaggtcttgctagtgtggtactaggtgttgcctgtttcttccttctcatcgacaccccggctttagccaagcgctggctatcccctgaagaaattcgctacctggagctttcaatgttcgtcaagcaaggaggaactagtactggggagtcgggtttcaagtggagagacctcaaggtggtcctgatgaattggaggatatatgtgcaagcgtaccttttattctgccaatcggccttgtcttacggtaaccgttgttcaaatccgattcgagacattgggctaattgaatttccacccaggtaccaagttcaccctcccgactatcaccaaagccatgggattcagctccacaaatgcccagctcacttccgcccctccatacattgccggcgcgatatctgccatcgtgtttgcacggttgtccgatcgcttctattggcgaatgccatttgtctgcatccccatggtatttgtcgtagtagcctattctattatcctctccctgaacggggcgctggaagcaaaaaaaggagtggcatactttgcagtcgtcttgtctgtcataggtatctatcccattcagccaggagctgcgtcttggaatgcaaacaacatcgccccagcgtctcgacgggctatgggaatcgcgctagtgaactgtgtcggcaatgtcggtggcatactgggtagcttcatgtatatcgagaaagagagccctaagtacaccactggatttggtctcagtttggcactcggtggggttggattcttggtagctttgttcctcgaatggacatacaagatgggcaatgcaaagaaggcaaggattgcagatgatgcaagagttaactacacggaggaagaattgtttgatatgggagacaagtcacccctattcaagtatgttttgtaaatactttgtgggcgggaatgaatttatgatgatgtttttttgatattacgatatgtccgataaaacgctcctgatatcttcaatctaagccagcgcaagcctcttaggcaggtgccatcctatatcaaacggtttcgtgctgatttcagtttgctctcttggttccttccgttctccttttactttcctgtctcccacatctcaaactttttcaatttgccccttctcgttggtatcaactcacttaaagagaaacacaccaccgccaccatgaccaccgatgcgtcaacaaccccatctgagtcgcagctgaccggacctggccctacaagtcctttctacgggatgtatggtcattactggaagtcaaacagggatgtgccgcccaccaaatggctgtaagaatcagtttgaattgaaccgttgaatataactaaccgattctatcagtcaggagagcaagaagctctgcgcttgtgatgcccatcaggcaagccagtggccgatggaacacgcattaattgtaagtggaaacgcccaaacagtccattccaagatgccaatcttcttggccttagacgattcctcgctgcgcctacaagtgtccctactgcccaaagttcgataccctcgatagtaccgagcctcaggtggtgaagctccgtgctcatatcgtacgtgaccatttggtgagactatcattcgtgaatgacttgcggcatactgatgtcgattagaagagaaaatcatatgaattccttgggttcgctgtcaccccggccagagtcacaaaagcccgcgtgccgtgagttagccttgttcaacttcaatcacctacttctaatcccattgattcttctagtaagccatgacgttggtagggttcagcggttcatggtgcatgcattttcgcggttatgggttcattccctattccaagaagagatttcgtaccacaacagaacttcaatcagaacgaatttacgtatctttgtgcttacccttttccatgattaaaaacctagaccatttcggcagaaacatgaattctatatgtaatcccatcttcaggttcctttgttttcgttctcaacttctatgatatcgtaaataataagcatacaggagatacttatcattgcttgtccctctttatagtgaaatagatactcggtataccggattagctagtgctcaaggcaataaaagtgtagtaaaataaagaaagttgtcctttcgaaactagcaagttcaagattcatcattattctcagccatccataaatgttagcaaataagcctcctaataccaccaaaaactagccacataattaaagcactgtgatttggaaattaccaatccgtttctgtcatcgtcgaatcgttttcgtcctggtttggccattcggaacgacccacaagctgccatggagcatagatcatttcttcgtcgatcaagtcaaacgggttctcgaagttaccatctaccaatccccagattgaagccagagagatccgacgatagtgcggatcctcttcctcttccggagggcagccgtcgtcactctcatcggtgaattcggcttcgtcgtcggtgagagtgtcttcatttatgcagcgtttgtattcggcaactatgccgtcagaaaaatcattttccatcacagtatctttcattgcttcttcagaaagctgctgttgaaggtgttggttttgcatttcgagggtcttcaatctgatgtccgtgaagtcgtggctcttcttaccatcctgagagaccgcatatcggattgaaaattcattctttttgttctccgaaatctcaaagctgccggccttctgacaacacccacattcgacagtgcagtggccatttgcatgcttgcgacgatcaccaataaatttgcgatcaaggcaacatccacactcacgtccacagcagcctcctctcctagcgcagtcctctcgaagaacacgatgcatgtaccatttgggatttccccgccagagctcaaaagctcgggtcaaaggcccatcggagaaagagccccggatcgtccaccactcgcgctcaactcgtttatattctttgtttgattcgctaagctcttgttcgactctcgctccacttagctgataatattcccagcgcatttcccgttgagcgatctctcggagcctagtctccacgtcgaggaactccgccaggcgatcttctttgccgtcgaggtcttgttcatagatgtagagttcaaatcgacatcgctgaagggcatttatgtctccagtctgtctgatctcgtgttccaaactgccttccataccacgcgtgaacttcttggatatctccagcctgattatattgggtccggtttcaatttcttggagaccttttatcttttccttgagtttaaattcctccttctcgagctcagctctgtcgtgttggattctaagctcctgattttggagttcgattctgagctcatggttctcaagtttgtttttgctgtgtgccaatgtaatttcatgcttttccacatcaaattccaattgacgccttttaagctgacgctcaagctcttggagctcgatttcctttgcggcttccgccctgggattgctcattttggatgttcgtgcgagaccaacgcttagtgaaatcagatgggaaaggtagataaagaggtaggagaatgtcaagtcggggttttggttagaattcatacatcgacgattcatcgtgatgtagtcccgtatccaatttgggtaacagctttgattatgtatgtttccgcggtcatagttatgcgtccgagataggcaaatgatgattaataaggtccctttattatgattggttaccataacgacaggtgacccacaacatccccacgtccctgccgcgggtggagatcggcacgctgacataatccagggcacccgccggccgcccggcaaaaaggccaagccgcatgcagtcgtgtgtcccgaagcttacgctttttttccctctttgacttcagttcttggttgtcaacagctttttctttgtcgcgaatatttacaatacgcggctccacacgcaatcgccgacccgactgctttttttattttatagcgaccgcgcataccccctgccatgtctcttttccaggccgcctttgactatgccgcacctgtcttgtacgtggtcgtaaatgactgacccacgggttcccagtgctaatcatgctcgtgtgcagccttataagctctccggtcacatcctatgccgaccaaatcttcagcattcatcgctcaagaagctcggcgggcttctccttagacattcctttgattatgctgatctcgtcgattctgaagtaagattccgatcggcagcgggttgatattcgaggcggcagttccatgttaacattattaggattttcttttggttcggcgagtactactcaagaactttgttaacacaagcaattgtcatgatcgtggtgcagatcacgatgctcaaggttgcactcgataatcggccctctgccggggtgagaaatggaattgagcacacacccttcagcggtggtaactccgatggttcatcctcaagaccttatgagttctggcagtggaaggctaccaagccgtaagtctcggcatctccaaccactgcgatcaaagctgattacccattttcgaagatattggatgtgtctagcctacttcgtcggaatgttgaccatcatccaccttaccccggtcgctcaatcgcgattctatatcagcctccttggctacatcggactcgccgtcgaagctatcctccctatccctcaaatcctcgccaaccaccaatccggctcgtgcaagggcttccgattctccgttattgcggcatggattctcggtgacactatgaaaatgagttacttcttcaacagcacagagaccatcccctgggcgttcaagctctgtggtatcttccagtgtgtgtgcgacttctacctgggcttccagttctacttcttcactcgcaacaccccatctaaaactccatcccactcgctctccaactcgctctctaactcgtttgctatcccacactcacactccaactcactctcgcacaatttccctgtctccgattctcactcccgctccaactcccaggctgcaagcgagtctatggagaatgaccgctggggtcatcacgagaaggacatccgcatggactgaaacactcgcatgatgaacttggactagacttcatatttatgtagataggtagcattggaaaacagcactatagatctgtaatttgaatgagataatgtgaatactatgatggtttcaaaaaaaatcatttcccggtgattctccgattgcgcgcctggtgaggggggggcttgccccgcgtcatttcgactgctctgctcgaacttctgcgccaacgtcttccccagtaacctcagatctaccgcttgttcttctccaaatcaatagtgcagctgtgtcttacacaatggccgacttgcccacagtccgcattggctacgtgcccggtacgtcagctttcccacagcttccgcatcagatgcaaaacagtactcccgtgtctatgctacagcctttgtctcaacgaagcctgccagtcacttctattgctctcgggcagaatatagctaacactaagcctttgtctactagagcactacctaaccccactccatctcgcactccgttccccggctgtttcttccctcccattcaaaatcgtcgcaactcccttcccatctgggacaggccatatgatcacatccctccgcggcaatgaaattgacgtcgccattggtttgacagagggatgggtcgcaggcttagccgggaagcagcaagcgagtcagacatccccggatgcagatggaggatacaaagttgtcggccactgggtagacaaccccctgcgctgggctatagtcaccggacgcaatcgggacgagatcacgggagtgtcggatctgaaggacaagagggttggagtcagccggttgggaaggtaagctatcaacatgagtcatgagcatagtatagcttggagactgacatgttggcctacagtggctcgcatatcatgtccttcgttcttgcgcagcagcaaggctggaaagctgactctttgaccaccgtccctctgggacccttcgggccgttgcgggatggtgtgtctggcctcgacgcctcaaagcccgaccaggctgcgaacccatcggctgagttcttcatgtgggaggaatttaccacgaagccatacttccatcctacagctgagagaccgaacccgccgcttaagaagattggcgagatcttcaccccttggccttcttggatgattgtcgcttctacagcgctgttccctaaccccgagaaagatcagcgattggagagtctcttccaggctctggatcagggaatcaaggatttcgaggctgatactgcacatgttgtgaagcttttggatactggtgagctcggttgcaattatgtcgaggaggatgcaacggagtggctcaaggatgttaagttcactaatgccacccgcggtgttgatgataagattattggaggtgttgtcgatgtgctcaaggtggctggtgttattgactcggcaatgagcaatgatgaagctatccagcgagtcattgggatcaagaggtagcttccttggccctcgaagacggagaagtcacgatataaacagtatgcagagagatctgctcataataccatccagagctagattctatatatgccgcattgacgtgcacaatgttacggtccttgatatcggggtcctgtatgcatattcgtaatattcgtttcaatgggataaggtcaaggccccgccgctacttcattgctaagccatctctcatatccgagcctgattgtttcaaaaggaaacctcactcggtcggctcagggtagcgctgtagccattcgtcctttgtgtagagctgccctttgtcggtcaggaaagcagtgatctttttgttgagttctttgtttaatcgttagcaagaacttcactttgatatcagaggtctattacattctactgtcatttcctcctatgcttgcaatgagtaatagttgcaccccctttcacaccacagagagcaccgtcgataacacctttcagcgtatcacatggcaatgaaactgtaaccggtgtcatcgacacgaagactctcgtatgttgcactgagatactggggtaaccaggtcggatcgccaaaagaagatcaaaaacaggaaatgaggaagattagacagtaaattgaggatgatcaagagagctcagatatgtgaaaggtgaggtaaatgtgatggataggggagatgggaggaaaaagagagaggagaaggagaagatgcaggtgcgtttgacttgttaccttgttgagacgagaatctcgagaatagagatctcatcgtcaactactacttcaaaaactgctccaacaactgctttaactactatttcaacaactacttcgacaactgaagaccgagtcggggcaatgaacagtccttagatagacggtagactttcaccttttgttcaaacaatgtcttccactcaaaattgtcatcggccgaaaaattcgaaatggttggcttgcggacagcgatacaatgaacgcatcgcgagcgacgagttggcgaagaattttaccaaaaagtagaaccggtaagaataatctcgattcctctgggaaacttgcggctatacttccatgaatcgggctttcggtaagtgatccgatgcattcctgcaggaattgggtgttcgaaatgaactgggaatgccctcgtgtagcatttgacgctaacccaatggaataatactgatctagatgtgatatgtacaacatagtagttgcattctgcaggggaatagcatcgaattcatgataaataaaggttcggataagccgaagcctgaatgtttcgtactcaagtttgtcagttatgtaggttgtggtattgggtttgctgatatatattgaagagcattggctggttgaatcttctatacaacggtgctctacatttaaaattgttatttaaagaaacctagtctaaaattcagcaagaacttaattctttgacagaaacaacaagctaaaggattttagcacaaggtgaacagttcgtcttgaaagggccaatggagtatagttcgaccaactacaacataatgacgaccaccgagatgaccacccagatgacaagggatatgacgtgtttaccaggcataggtacggtctctatagcagcagagtcaaatgaggatggcctagaactaaactttacatccacacatgctcatccctcggtgcattcttagatctgccctcagtcccccgacaacaacactggaatgcacaccagggcgcgtgaaacaccccacaatccaatcaaaatattcacctggctaaaccacctacacaaaccatctattcgggaccaaggaatgaccccgaacctccttttcgattgttagcgtggacatttggatcataccatgcgctgcgggcaccgggtaagcaagccacttgaatgaggaacgcggacatttctttttagaaaataacaaggacaaatatgtatatagtatttaacaatgcactatgctcattcacgatgaggatcggtgttctgactctcctttgtcgtttccgtccctatacatcctccaatcccatatattaatttcttcctaatacctacttaatctaacgcgagcagatactgtactgcgctcgtcactatgcgccggtatctgtgtcttcttgcttggtctattttgctggctccattcggaggagcacaggcgaagctggacttaaactcgactagcaacatcgttgtttactggggtatgtgcttgttggtggtttggattaattcgtacttacatgagacatactgaaggccagaattcattcaatggaaagggggatcaggcacagcagcctcttgcacactactgcgatagtgagtgaatgatatatcttcaatgtggtcgttcaaactaacccgagcctctagatgaggacattgatgtaggaactaggtcatcaggaacgctttcaaaacaatgggctaacaaaatggcataggtgataccaatggccttcaatatgatggtcaacggcccaggaggcgctccagagattgatttctctgttaccagcaaggactgcgatgtcttcgaaggcacagaattaaagaactgtccttcaattgcgtaagaacatatcccgtccgctgaccatttctagacggctgacagtatctaggaaggacatccaaacgtgccaaaagaagaacaagacgatccttctttcaatcggtggagcgacctacagcgagggcggcttcaagtccgacgaagatgccaaggacggtgcgaagctgatgtgggagacctttggccccaagaaagagaattcaaccgctcttcgtcccttcggtgacgccgccttggatgggttcgacttggactttgaggccaatgtccaacacatggcccccttcgccaacgagctgcgctcactgatgaaggcggataagagcaagcaggatttctacttgacatcggcaccgcaatgcccctaccctgacgaggcagacaaagagatcctcaacggtcctgtttacattgacgctatctgggtacagttctataataactattgcggcgtcaacaatttcaacaccgacagctcaagcaacaaatacaacttcgaggagtgggacacctgggctaagaccgtgtcacagaacaaagatgtaaaggtcatcgtcggcgtcccagcctttacttctgcagctagcacggggtatatcccggcgtccgagttggccaaggtgattgaatacacgaagaagttcgacagtttcggaggtgttatgatgtgggatgccacacaggcatacgaaaacgatggatttatcgaggacgtgcgagaaagcttaggttctgcgaatgattccggttcgtcgtcgcccgacccggtgtcaacctcggcatctgcctctacgtccactgacccaacgaagacaaccaccacaactaccacaaccaccaccactacaaccaccacaaccacgactacgagaacgacgacgacgacgacgacttcgccatcttccaatgcacccgtctcttcacactcatcctcctcctcctcatctgcttctgcttcgcacaagggagctgaagaaacaaccaccaccaccaccaaagaacataagcctaccgttacgaccaccacgcaaaagcctgtcgcttccactacccaaccaaaaccgactactatcgtcactacaaccgcaaagcccaaggcttcctcaactacatctgcggagacaactgcgactcccacctcgaatggtggccctaactcgccgagcgacgacgataattcagacgatggaccaaatgatgagtcgggtagtaatctcctcggctctatcctcgggaacgaccttcttggtctgctgggtggcctccgtaaggcgaacaaggctgctagcggtatcacccatggtctagccaacaatctctgacatgctcagcgcaactgcgcttggggttatgaccagaactgacatcgccataaacaaggccttagggagctgtgtttctctggcaatgaatgaacatgattgggccgttgagcgcatataaggaatttttacgatgaactcgaggtcaatttagacccgattcactcccattttgtcctttgaatcttttgccttctttatacccttcgatcttattactttcaactcatctaatgtcttgtttaccctttattcgataccctatttaatctttccctttgaagcttggaaaattgcaccattattgttgctttgtgtctttcacaaatgcgatcatacaatggagacactattggattggactcaaaatatatctataagctgacaggtatcatatggtttccatctatagtaactgattgaattcaaaagagataactagaggtatttgagcgccattaggatacttgtaagcagattcaacacattagagattaacatagacaccctcgtgctcttgtacgttgccccccgagaacacgccataataataacgttcaccatcgacaatacctaattaggccaggaacagaacgaaagacaactttcaacatccaatgatagtaagatccggacatcataccttccactcgatatcccaccccttcactcagcctcctcctcctccttggttgtagccaaggagaaccggcccttcgtggcgcccgattcctcgtactcaaccgtaacacgagacaagtgagcaagcaggttctcaattctgatctcacccttgtcgcgcttggaacgacccagattatcgagccactcaatcttgttcaagatgaagtatactagagcgataacaatagaaacaccaagcgaataaccccagattcgaataacagtgacgatatcggtccagccatttgtggtctcaacaaaatggtctgcgggcttggttggcatggtttggttggtaaaccaaccgaacagacagtagatcgtagccaaagcgtcgacgccgaggatagcgactaccaggtggattgatggccatgtgtcgatgccgcgagtgacgaaaattagccaattctctgtgagtgccacttccaaaaagagaacctcttgaatagatccccagttttggataatgcctccgttcttcaggaacatacttcctcggataacccacgtacccatggcgagaagcacaccaagaaggcaggaaatgacccagattttgggaagttgccattccacaggtcgcagctcgaatgatgcatggtcataggcaactgcaacggtcgcaagatcggcgaacaatgccaggaagacaataagctccacacggatgctttcattgaggatgatcatcgaagtcacgaggtagatctcaaggtgcaagcagagtgcaatgcggtattgaatatatgacttcatgcggtgaaagatttgacgtgcgaccttaatagagtcaatgatagttgaaagaccaggctcgaggaacacgatgtctgctgcggactgagcggcttccgaggcaccttcgacggcgatgccacaatcggcttttttgagagatggtgcgtcatttacaccatcgccggtcatagcggtcaagtgccctcgttcttgtagcatttgtacgacttggtatttgtgttccgggaacacttcggcaaagccgtctgctttttcaacgagatcactagccatggcaccgctcaaaccgccgtggattagcttgtctgagttatacaccttagtacccaaagccaacatcttgcaggtttctttcgcaatagcaatagcatcaccggtaagcatcttcacgctaataccgagattctgcgcttcgctgatagtttgagcggtatcttctcggggcggatcaaacataggtagcattccaagcagagcccaatcctcgccttctttctgaacagcaataccgagagagcggaagcctcgatgcgcaaattcttgggctttggccttgtataagtcagctgtctccttagagcaacttgtcaattgaagcacggctttcggagcgcctttggtgcaggtataccgaataccgtcacaggtggcaatagtgacaatgcgttttgaaaccgggtcaaatggcgtgaaagtttcggttgaccaaccccgtcgcaggatttctcgtgctcttggatactgcctaagcgccaagattgtcactttatcaatcggatcgagagattcaatattgtgcgatgacgcgagagcagcaacggcaaacatccagtccacgtcgacgccttcagctacataaggatcacgaatactcagtttgtttgccgtgagtgtacccgttttatccgaacacagaatatcgacaccctaattcgctgtcagtatctcataatagtccaatttgacgcagacttacggccagggattcaattgcagtcagcttttgcacaatagctttcttctttgccagataggcagcaccgacagccatggtggtagtggtcacaacaggtaaaccgacaggtacaccaatgatcaacaaagacagagtgtagtgaagcaaagtctgttgaccaggtgaagcgataggaatatgacggaagaatccaccgatccatgcagcaaggatccaggccataacgagaatcaagagagatgttccaatattgtccatgacaagttcgaagtgaccagcgcctttagcagattgcaccatagttgcagtgcggccaacgaaggaagtggtcgcaggcgtttgaacgacagcataggccttgccacgcttacagccagttgtatagaagatcatatctcccatgtaacgatccacagctagcgactcgcccgtgatagcagagtgatcacaagctaaaataggatagccacgtctgcgagccttcttcgcctggtgttcgtctttttccttggccttgctctcgccttctccgccttctccgccttcgcccttacccttatcggtattggttgggtcttcctcttcatcagactcggaccctccaccgagcataccctgctcttgaagctggttgaactcttcccagccatgttcatccttgacatcacagatgactctggagtccgcaggcacgacttgaccttcaccgacgatgacctaaatgattgataagaagtttgcgtataccaatgttccagctcatccaaaatagacttactacatcgcctggaaccaactcccgagcaagacattcttgttgagtactgtcacgaatgacctgcgcacgcagggcaatatcacccttgagactcgcaacaatatccgcagcctgcttctcctgataccagcccactgccgcgttcagacacaggataccaatgatcacaccaaaatcaatccagtcctctagaccagcagcaagcagaacagccaattccatgactatgctccagtcagtgcggtaaccaagggaggagttatatgcactcaccgtagagaattggtccttggaagtaagaaagaatcttagcaataggattttccttctcggatgtcatctcgttccaaccagcccgacgccgacggattggcacttcatggctagaaagcccctctcggacatccgtcatggtccaatcatcgggaaacttgccaacctccccctcgacctttttgacgcggaccttatgcttcttccacggggcataccagactcgtttctcgaccaattcgccctgttgttgatccgccgcagcatcccggaacgtcgaaacgtacttgacaagcttgccatactcgtccagactgttgtagtccccgctcagagatgcccgggagatacgtgagctccggcggcgagtctcggcacgttcggcttgaccgtcgccggacatgtttggctttataaatcagatcatagtccttccagtacaaacaggccagataggcacatacctttcaggagacgagatctgataacaaaaatgaatgcacgaagcaaaaggggaatatgaaaatgaagcaacaatgaaaagaaaaaatgaacttttccaatgttatattcgcagttcggcacctgcgggatgtcaagtattgaagatgagtgcaattttatctggagtagaaaagaagagaagtagctaggtagcgtagcgaaactatccaaaagaaatcatgctgacgtcgggccaggaagccctcgggagagacatctcgcatgtatgctcattgttttggtctttgtactcggtacttgaaggatgatgaaaccagggaccaaaagccggggaaccaggtctccaaagggacgagccgcggataatccgaagaactcccgctgggtcttgatgcatagaacattggttcgaccaatctagatgaagcccataacatcatagtcggctctaagatcgaaagaagctagtggtccaagccaggtacccgaattgacttcgagacaagggcattcacccatggatcgtggaagatgtttcctcggcgagggacatcacgacgatgggaaaggggtccaggtcgtgtgtctgcggctgtaggaccttgtgctatactgatgttcctacaggcatcaaaggtcttatgcggagatgatcatcgatcagtgcatccagctatggcgggacacgcattgggcgttgaacaccgtagctataataccattcgaagctatgaaccagaaagatccggggtgctcaatcaagcataggtgaacgaatgaactaggcccgtttctgctgtagagggcgagcggctgtccggatgtcaactgaagcagcaggtaacctgcgacgtcatgcgcatccattccgctgacagccggccggcggagtttacatccattccacgccaatgtttctgattcgtcaaaagaaatcatatggtcggaaatcgaaccgaaagtataagatggttatgagcaacttgctagcgagatcgttgcagtggagctcggccacacgtgaccctgttcagccctacacgcgccattacaacgcttcccagaactccccgaactaccctcccagagtgggtatggtatcgtccgatggcctttacctgcattcaaatcccgtccgaatgccctaacaaaaaaagcccctggataatgccaccaggtgccctttcgcccaaggtagcccttcgtagatgcacagaggatctatattcattttactgaacgcaagtggaagcatataaacaatctttcattcttcttatcatggatcactcataaaacatgattcaagcataactgacacagtatctatttggtcttgccggaaggaatgttgaagaagactgcaggcttaccaggggagtaagcacggtccacgcggtagtagcccttacggtcgaactgaatgatatcgctctccttgagatcagcgacgttgcagtcggccagacccgcctcacggaactcggtgtgcaggttgaggaagtcctccaggacgtcatcctcaccgagagaatccttggtcaacaagtggtcaaagtcgaccaactcgacaggaactaggtcctgtccctcggtggcaagccaagtcaccttcttctcggtcttcttgacatcgccagccatgtgcagctcgagctcaagatcggtaatgatgccggtctcggggttcgtggtgatcttgcgcacgatggcattgccccagttcataagagtgatctcctcgtccggcttgaagagcttgacatcctcctgctcgagaatgatcgagctgctgtagacaaccttcttcataccgacggcggcgttcttaatgtgcttaggcttttgctcgctgtaaggggtagcagggccaccaatcacagtggtcttcacaacgttcttggtgaagatcgcggtgtggcgtggggcaataggatcaatgtatttcttgttggtagcccagataagaccccagtcgaagttggtcacagccttggaggggccctgcttgaggatgaattcccggagagcaggaatggtcataccgcggcgacggataccacgaatggtggggaagcggggatcatcccagccccaaacgagaccagtctcgaccagcttggtgagcttacgcttagagaggagggtgcggacgaagttcatgcgagcgaaatcccacacctgcacgttgcgcagcttcatagtatccagcatccactggtactgggggttacgatcacggtactcgatagtacgcagagcgtgggtgacaccctccatcgaatcaacaatagggcaggcaaagtcgtaagtcgggtagatcttccatttgctaccggtgcggtggtgaggtgttgggttgcatcggtagatgactgggtcacgcatggccttattggggcagtcgtaggagatcttagcacggatgcaccaacgaagaccctctggggtgctgttcttcatatcctcaagatgcgccaagctttcctcggggggaagatcccgacgcttgctaggcaatccgtcccatctctgggcagccatggtttctttatcggtatcatctgcgtaggcgtcgccctgtttgatgatctggatacagtaggcgtacaactcgtcgaagtagtcactagtgtaagtcaacttgttaggcttgatgcccatgagcgcaaggtcctccacgatggcatcctcgaactcttgcttctcgttcgaggggttggtgtcgtcgaatctagtacaagtcagttcagggtccttgattttgtttgctatttgtcttcaaccaacctcagaagcatagtaccgttgtacttctcatgcgcaaaatagtcgttgagaagagcggccttggcgtgaccaatgtggaggtatccactacattaaagcgaacgatattagtctcagatagattaaacaagaattgggtcccaactcacgaaggctcgggagggaatcgggtaacgacaccgttctcggtgttcttgagcgcaatgtcgtaactggcgccctccttagacttggccaccttcttctccttagcaactgcgttcatggattccacagcggcgggagcccaggggcaaagctcctcaatgaacctaaaccagcgggtaaggttcacaagggatcccttcttcacggccgcagtggcgacacgattgcctcggatagcaccccaaagggcaatgtcgggggtcgacagagagtatccgaccacgaacgagcgcatgaggaggtgagtatcaaggcgctgaagcacgggatcgagggccttgaaatccaggatggtcagggaatccaattgagagatccactcagtctcctattgcgaggaatagtgttagggttatttcggttccaaaaaaaagactcgaccgcggggtagtgactcaactcaccaccttggaatctttgccagtcaggaaagggaagtgcttagtaagttcctggatgacattggcagtaccaaagacagagttggaaccactagtgagctgcacgatggccttgtcgccatcctggagaagagcagtgtcctcatatgtgatgttgatcacgggggtgggacgggcctcattgatggaggtgacgatgagaaccgcaggcagagttgcagcctggttgccacgagtggccactttcaactcgtattcagacatggcgcagaagtgtagtgttaggagcaatgtgaatttctggcgggggagtcattatctacagtccccgtccggagccacatttctccgaccccgactgctttccggcagaaaacaattgcttcatccagccgatcagctcacatcaacgcttgccaacatgtcgtcctccggctcggtactgcccagtgcggcacgaggaatcctatcatcatgccggaatccgctgcgaaattcatcaatcgctcccgttctctcgactttccagcaggtccgaggtctcaagcacaaaccaaagaaggggaaagagcagcctaccaagagccgcaaagcaccccaggagttccggcaagccaatttgaaggatatgccgcagtattccctgtgtgatgctatgcggtatgtactggacacagatgtcagccaatagccgggccatcaattgacaccttcctttctgcaggtatatccgggccatcgaagtcggtcgcgagcccaccgttcaaaaatacgagctgcacatccgactgcggacaaagcgcgatggtcccgtcatccgtaacatgctccgattcccgcacgccgtccagaccgaatcccgcatctgtgtcatctgtcctcccggttcgaaagcggctaaggaagcgcttgctgccggtgccgttctcgtcggtgaacaagaagtgttcgacgccgtcaaggcaggcactattgagtttgatcgctgtctcgctcacccggacagtttgccggcattgaacaaggccgcgctgggtcgtatcctcggtcctcgcggtttgatgcccagtgcgaagactggtaccgttgtagaagatgtggctgcgcgagtggagatgctccgtggtggtactgtgtacagagagcgtgatgctgttatccgtctgcccatcgggcaattgggcttctctccagaacaattgcgcgacaacatgcgcgtgacccttgaccagattaagaaggatgcttccgcgctgaccgaccgtgtcaacaaggaggtctacgaggtggtgagcacttaattgatccttcttgtggaaaaatctctaacaacaccatcaggtactgagctcgacgaacggacccggattctcactcagcggcgagttccgctctgacgcctctcccccaacctccgccttggccggcatgtaacatactcaattttcttatatcctttggcgtgtacaaatttattgttttattaggaaaggacatggtgtatcatggtatcattgttgaactagaactttataagacgaaacgccgacgctatgtatgcaagccagtgccgattgccaatttccaggaacatgcacgttgtttttacagcttgaggttcttcagcgcggcaacggcactgacgtcctcacccataagctcgtagaggcgcagaactgccattgttctagcgtcacgtttgccctgtttaccacctgccgtggcctgctccaaggcagttttgagatccaggagcactgtagacttgatctttgcgactcgtggttgctgcgcaagcaggaagggatgcttctcgccgacccgggcagctatcgaggtcaaatagacaaatttctgcgcatgacgttccatcctctttaatgaaattgcaggtgtgccatctgctagctcataatcctcgctgtcttcactctcgccgccgtacaaatcggactctgtatctgattcgtccgatgtggcatgttcttgcgatgacttgtcctcaatcatcaaacggtgttccaactcctccacccgatctgcatagtccagcaggtctttgccaatgtcggcgttctttcgtagtcgccgcttttcgttcaacagctcttccacttcctggcgtcgcgcctcgaccttgtcccgtatagccttgacgtcgcgctggaaagaaagtacgccgacttttacaccttcgactttctcctctcctccgcggagcgcgctgcccaacgagagaaagtcctggtagttctcattgacaagatccaacagctccttgttcaagaattgctccagtccccgcaattcctgtcgcagatcctcgaggctttgatgtcggtttgtcaatgacgagaggaaattggccggatcgaagtcaggggcgaggaatgaggtgcgagatagcggttccgggaaggggagaccagatgggtcttcatcgaagtcggaggaggacccgtcggagtcgccgaactataggtcggttagacgaggtaccaatttgagtcacatgggttcatacttggaaccgattcatggtgcgttccgggcagagcgtgagcaatgatgaaggaacacttgggaaacgtggtggtgtctatgcctcgatataacttacatacctgttgagcgtgtcatcttcatgtttggaaaattcattatcagtttggctttgtggcccagtggttaaggcatcccgctcgtatcataatggtgcaaacgggggggtcccgcgttcgactcgcggcagagccatcctatttttggctttttttgcatagtgtacctgaggtgcctgaaccacactgacagctttggtggtcatcagggaagctgtccacccctcggatgatttacatcagacaaaacactcaacgcatgtcgatgaatatgcattgcgcatccgacgtggatacatgcgaaacctaaccctctcaaagtcctgtcccctcccagagcggggtcggtgtctgcgctgtctcctgcattacacgtagctgtgcgctaccgcaaccggtacagaagatggagtcggagacattgcccggtacaaggccttcgtcttccctacctcgacaagcatggccccgactacgatccctatcccatgcttctcaagttgtgcccgccgtcgacccatcacaccagacaaaccaacggtaccagtccatcgccgaagaccccaccgctgcatatcgtgctacggctttgcgccaactaaacggttctccgaggcctgcatcccgtcctattcgagtcgataatccctctgcccggcgcttgtcgacacctgatagaggcccggtgctagtcagggcgtattcgggcgatgcgcagaatagatctacacgacggtctactatgccctcgcgtcggttcctctcgttttccagctcgaggagctcgcctcccacgcgcccgtcccagtctgatgtcatattcccgacggataaggacttcagtattgagagtatactgcaggccatcgagcctgatatccgtggcactctggattccattgctgagatctgtgggcggagcaagctgagtctttccaacgagtacgggagccacatcgcgcctttgggtgagatctgtgctccgtcgagtgcgctgggaccggttgaggaggccgggccgagtgaggaacgacgtgccgatgacagcaatgcggtcattgtcgacgaggacgctagtccgactgattcagctcaggatatgcatccattctcctttcatcggtatctggaaaacctgcggcatactgcatctatgcaggagcagagtggtacacttgaccaaataactcagcagccccattctccattttctccgggcatggactccgcagcggaaactattgtgcctatcgccccggtcataccagcgacccctttcacgcgcgaattcgcatcaagacccaagcataacggacgtgatctacttgcgaagaatgctcctgctggcagtggtaaacagcagtcatatcagatggcgacaccggctgttgtttcggaggttcatctagaggcgattgcaaatgatggatcctccgaatccaatattctcccgcagtccgctctcggcggggaaagctcgggtccggaaatcactcaatccctcattgggtggctgaagtgggctgccactatcgctgggccggaatccagtcctgctttgcagtccgcggagagccggctgcgagctatgcttgatcgatcaggcaattagggtctccacagtgccttgatcacgactcatgttatgagacatgataatgactgatgtttacgatcttgcaaacaagattcacgatactatcgacacatctcaacatggttttgtttctaacaggttatgtttgaaatgtcggcttgtagacttttggtagtatacttactgctgggtattttattctgaaatttgcctagaaatattgcctgggaggatcaaaagaaaatatccaaattattagcatcctacgtcatcaaaggatgttcgcaggatgccaattattcttccctgttgtactctacgtccccagaatgactggttttcgccacattgtttacagcaaaagtgataccaatatagcgagtttcaatttgactcgagtaatggaggctaaagagtgaagcctaggacaaaaatctccaagaagtgccatcggcattaaaagcccaaggcaaagttaagcggaagccttaacctcaagacgcttgaaaccaccatcagcagcaacctcctgctgaagtgcagccatgcgcttctgatcaccaataggatcagtggagtcagcatccagaccccaagaaaggaacttattggtgtagttcgcgacgaagtccgcgtccaagatcccaagtctctttccatagttggtaaccttagtccagtcccgctgaacattcttcagatcgcgcgagaagtaagcaaacgaccgctcaaagatcttgcggttgacatccgtgcccatgatcggcttgacgtcaatgtactcggcgtacgccgccgcaggatcagcgaggacatcgtccgtggcgcgcttgacggcgcgcatgaacgcagccaccttctccgggttcgcggcgatgaaggcgtcgttcgcgatgtacaggatcgagcagaagcagcagcagcccagctcggcgagctggtcgatgcgcagcatctggacgtcgctgcggggtcggttctggccggcgagccattcttccagctcgaccatctgcacgttctcgagaccgatgccggcatcgattgtgccttggatgatggctttggttatgttcattccgcaccgcacggctgtgtagtcgtcggcggtcatgccgtagtacttggtgagttcgtcgatttggatctggggttggttgttagggtttgtttggaattgagtgtgagggagggaattcataccttgccgaactcgccaacgtatccgattcgcttgcctttcagcgagcggaagtcctcagtgataccgctggacttcaggtacacgactccggtgaagggctcgtcgaggagtgagccgatggaggtcacggggaagttgcgggccttggcctagacgtggtattagtatggttggggtgactatcatctgcggggaatgtatacgaaccgccagggtgtgaatcatggccttgaagcccatgtcgaccttgccgcttccgatgatctcggtgacatcggaggggtcattaggctcgagcagagcgaccttgagaccttcatccttgaagtagcctctggcctgggcgaggtagaggggggcgtggtacggggtcgcgtgcctttgagaaagaaaaaaaacttagccaagtcgaactacaagatcgagcacgggaagcccggaagctcggattctggaacaatgtcagcgtaccagttggtcaaaaaagtgatcttgtcggtagacatgatggcagaaatatcaagctattgaaatacttcaattgggtcagcatgccaagagagaacgcatccagctctactctacccatgctgttctccgttcaacctatgtattcaattgaacggaaagcagcagtgtgagtagagccagacacaaaacacaaaacaggggaacaatcaaagtcacgcatgtcctttcgctagtattgtctagatcaagttttgacagtataatctcagaacagccagccagtcggtatgggaaaaagaaacccaacacactccaggagactggagtaggtttatagttctccccaatcgactggctggaccgaacacctgtcatgcgagggcaacgactgttatacgaacaaataccttgatccatctcttcatcttagcgaggacaaagtcctgcgacccaacggggtcctggacgtgcgcggctccattggagagtcgtaccgatggtagacgtgagtcgagttggattgaagttggattggagttgagtgtaggaatgagagaagatggaggggcaggaggggtagaaataccacgcagaaatacgatgaatcatacgaagtacttcgctaaaggctggggccggaataatcgactgtgattgatcaagttcctaactctatactccgtacggagtattcacgccgggttaggatgcaataggatgcaagtgtcaagtggatagagtcggagttcatccctccggattacaacggatatcctcgcaacgtataacttccatgtgattcagtttaattaaagaacaatcataggcttcagatgcactgctaggaaaagatcatataaagcagagtgattaaacaagtacagatgacgtcacgagcagagtgtccactccaagggccaattgtgaggttgacagctaagcgacagggttccaacaccctcaactagtctgtccgatatccggcgtcggacccttcgcggccgttgaccgatatactgtccagtggggacgatgagcgttcggccatcttgcgggttcgcagtgtgagggggaagtgctcttcgggctcttcctcttcactatggaatgtattagtatttgacaacatcaatcatacaatggaacttacggcaatttccaggcaatataatcctcagtgctcaatccctcgtggccttcctgcagagaggcaaagtcaccgggagtcatcatcccggagcgatcccggggagatccaggaaccgaaagcgggcgggagagcttctgctccgttcctccaatgatatcgaagtagtcctcttggccctcgaaggaggagggataagctgtaaaaaaagaattaatcataatcaccgacaacataaaaacgaactgcaacatacctcttctcaatgccagctgacgagccttgacatattccaagcccattcttttccagtcgagcagatcgctcaggcgctccgtacggttacgctggttaatgcgctggcgacgactcttctccgtgaagttgaacataaactcggtcagctggttgaccgaatcgtcgacgcccttggagcgacggtcgacgatgtaaattccgtaatcggacgagttttcaatcaattcctccatatagcaaccgaatccagacagattggtggtgatgctaggcacacccatcacggtacattcggccggtgtgtatccccacggctcgtagtaggaggggaagacacccagatgggttccgcgaacgaagtcgtcgtaatcaagcggcaatacggggttggcagagttgaggaattcggggtggaaaataaccttcacccggtcggaggagtggttgaacagctgaacgcgacgcagctggttcaggattgggtcctcgtggtcattgaccatgttgtgggtgacgatagggggcagaccggtgcgcttcatgccgaacaggcgacggcggagcatcacacgatcttgactggtgatgagatctttctcgtcgggcatgttgtcgccctccttccaggaaaggcagcgctcatacatgcgcttgccgatccccttctcgatgttctcgacggtgtcgcgcagagacttgacgacggcctgtcccttgagcgcttccactgtcaacgaagaggtctgcgcgggcataataatgaacgcgacgacagtcatcgttgacccagcggccttcagtcgatgattgaggcgggccagcccctcaatgaacatatcgacacccttgttgcggtattcgtaacgaccggcagtgaagagatatagagtattatccaggtcgaagtcgttgtggccgtagaaatggccacgaacgaaatcgttgatcttctccttggcctgggagtgcaagttctggaactcgtgcatggcagagaatttcttgacattcagaccattaggcagcacaccatcgggtttgcgcttcagcaggtgctcactctcaaacgcagtgatgtgcgacacagtggtgaagacatcacaggcatgagtagcagcgcgctcaatgcagtagcggtggtagattcctcgcttcccggcctccgcatccacatcaaagtactgaaggttattatagaaatcaaccgagccagcacagaggtaacgacccaataatgtcgcgtgggtggtgaagacggttgtgaggtccatatgccgcttcttggtcagtggcagagcgacaccagccaaccattcatggaaatgggcaatgactgcccggcgacggtcatgagcaatgtactacagcgagagcatggtcagtcatgcacttttgccatctccaacgtagacaatattgctggtacgtacctctcccaagaaccaagcgaccaggtatccaaaaacgatggcctcgttggtctcattgtcaccagcgggagacgggatggccgaggtgttccaaagatcacccttccactcgtccagccacctatagccagtccccgtatcaatgaggagaactcggggagcaccctcgatgagccagcgaccgtagacgatgtcaatgccgcgctctttcatggactgaatcgtgtctcgcatggccgggttagacggcgagagctcttccacctccacagcagccgaagccctgttgagagggccgatcatggtgtaccgctcgccatactcagcggtggtcacaggcgctttggacttgagaaccgagtagatcccgcctactcggttcgccacctcagtagccacctcgaagagcatgtgattgcgcacatcacgcttgatgggttcaccattttcctccattgtgctcaaggccacagaaatcacagaaacacagaaaagcgaaagaaaaatgagacgcgagaatgggggagggttggacgcaacaaccttggaagagctcttcgactcggtctgtgcggggagaagtggaccttttgccttgggctcttctgggggaggctggggaggagtaggggggcaatgtcgatcggactgaagatgttgaagcgaaagggatatattttagagcagagacagcagcacacggagtacaacaattcccgttcctcgttccggtcaagggtttttctccggactggctgacgggtgtgaccacaggactttttgccgcgaagaagtctctgttagggaaatcccacccgagactgaggaaaagggcgtatgatgtgctcaggagattttatattaatctaatgtctatccatggatacaggtctctttgcttggtatgtaacagtcgtagcagtacccaagtggcatcgccatcgccccacgccgtgtactcgcctctctctccgttctatccccgatattcccctttctcctaggtttcgcccggtttttccgattattgggcacctgatctgcatttattcgccttcaatccccgtctccaaagctcagggccaatccaattgcagtttctcttcgggtctggggaaagctggagccatgatgtcatctcacattctactccactgaacggcgtcggagggacccgccggagcttgatcttctacaaatcgccgaccaagctggccacgaatggcttgagatggcttcaaccatctgcatttattggcggggaggacgcgcgggccatgttggaggggatgatcgtcttggcagttatccaattccctcattggcgttgagatatgcctataccgtatgacatggcagatgcaaactactttttttgtacaacactgtgttcctggtctctacctaggttgccccctgcctggtcggaggggaatatctccgagatcctgcaatgtttgacctacctcaaggatgcttccaccggggcagtaccagacaatcatgtccacgatgtttacggatagattctgcaaaagaaccccaggatgatgaagccgctttcttttaccctgctagctgcctacatgggtaggtagtacagcagttgactcatcatagtagagacacttgggaacaaagagcccatcgttgacagaatcatcaacaaagaacctcaaaagtcgcagacctctgtttgttcccatcctcattgtaactgagatggagtccagtcctcatacctgtagagaatgttgtgttacttgctcgaaaagcatcaactgaaaggcccattgatgtcgatctcggagataccagtataccagtccagagaaatataaaaagctgaacgagatgagacctgaagaaagacagcttctgcatcctcccgtccttcagcatctctctcttctgatcaacccgacttccgatcttcaatcatccgtctcattagacatgtctgagaagcaggcgcgcaagagggccaagatcaagcgttggttgagaagttgggtattcactccgctgggtaaggtgaggatcaagttgatcaacaagactgaacggaagcgctgtcgaagtatctcggaccgtgagctcaattggatcgttgatggatcttacgctgatcgatatccgtctcgcttttatcggggccgcaatggtcgtcagttatcgagcccagcgaggaagaggttcctgctcgagactgaggataacctatctctagtagagcttgtgtttcctatgtccacacggtcagggagttcacaacaccagccttctagacctggcttttgtgacagagtcgaacttgctgtgactaccgtccaatctgattatcttcatgacccccgtggaagctggcgagggggtgaacattctgcgctgggaagcatgaatccggacttggctgaattgagtagtgacggtgaaaggtctaagtcaggccccgtttgtgtatttgaggttggtagaaatgtgtacgagctttccgcagttaaggtaatgagcccaaacttacctgcagagttaagtggtggaaatcaatctgggcagtcaccttccctttatgccgagtctgacggtgagatggccaatttctctgtggttgaagagctgcctcctcagcttcccgatttgtatttcatccatcaacccaacccaccattatgctgtctcatcagttcagctcttcagaacttgctctcaccggtccctttggagaacggtatctgctcctgtgtaaaattctcacacagtattgagccatcgattcaacatttgtcctcggatatgtcacggtcatccatcaagagggccaagccccggatgaccaccgcagaagtcctcattcgctatgcaaagaaaagacgagatgccatcataaacaataggtacatctcaccatatgctcctttacaaccacgaccactccgaattcggaaagattataatgtcaccagcgaaccgcagcatgatgtcctgtccgccattcccgtggagacgtctcatgaggtgacagcaccagtgcatcgtccacgatacagtctccgccgtaagatttttcacggcgcattacctcctctacctccttcggcacctacctcccgtccattcagtggttcatccattccatcttcttcgtctgaaccagcaagacttagctctcaggcccttggcatctcatccactcctgcatcttcatctcgaccagcaaccaatggtcttccacagtaccctgaccggcgaacatcgatgtgcggtggctgcctagaaggacgacaccgtcctctccacagccatccatatcatcgccatggcgacaacaacccgcaatctggaagtcccccactgccatatccacttagcccgcgggaactcctaaaccgcctcccacctggaattgattatgttccaccttcgctcatggctggccccccccgccccgccccccccacnnnnnnnnnnnnnnnnnnnnnnnnnnnnnnnnnnnnnnnnnnnnnnnnnnnnnnnnnnnnnnnnnnnnnnnnnnnnnnnnnnnnnnnnnnnnnnnnnnnnnnnnnnnnnnnnnnnnnnnnnnnnnnnnnnnnnnnnnnnnnnnnnnnnnnnnnnnnnnnnnnnnnnnnnnnnnnnnnnnnnnnnnnnnnnnnnnnnnnnnnnnnnnnnnnnnnnnnnnnnnnnnnnnnnnnnnnnnnnnnnnnnnnnnnnnnnnnnnnnnnnnnnnnnnnnnnnnnnnnnnnnnnnnnnnnnnnnnnnnnnnnnnnnnnnnnnnnnnnnnnnnnnnnnnnnnnnnnnnnnnnnnnnnnnnnnnnnnnnnnnnnnnnnnnnnnnnnnnnnnnnnnnnnnnnnnnnnnnnnnnnnnnnnnnnnnnnnnnnnnnnnnnnnnnnnnnnnnnnnnnnnnnnnnnnnnnnnnnnnnnnnnnnnnnnnncccgccccgccaccccccgccgatctgggatcggttctcccccaggattggttggtcctcgggcgttgaatcgtgtctccgtctccctctcagacaccgcacctgactcgccttgggctggccctgtaggctccatggcgttctattatgactctgatgaggacttgcctttgcccgtcgagtctgatcacgccgagagtgttggtccatctggctttgaaatgtgtctaattgcgggatcggctgctcaaagtcgtagataccgttgagggacaagttggtgccgacattcagtgagggtcgatctggaatacccgcttcttcttattacgtttccctaagttggtctgtgtcaatctcttgtcagactcttaattatgttagaatcaatctttcgggcatcagaaccatcaaaaatcataaaaataaatgataattccataccaaatgtatcttttcacataatctttttggatgttgctggcagacaaggaaaaaggaacgtatacaacgtagccctagtatgaaaacggtcgcatatatattccacgcaatgaacaaaacttgaaagttagttacctcaccacaattctttaataatatcatttactaatggttctctcgatccatgaccttccattgaatttccagacccagttccaaggcagttgagctaagatcttggtaccccaactgccatgaagtcatactctccactatgagttcagaatgttgtcacggccgaacacatcgaaaaccaaatgactataagtataactatcaaatactcctctttcaattactacacaaccaaaaagaaaaaagaaaccattctacattaaactacatttcacatttccctcctctcctaccaaaatcaaccaaaatggtccgcggcgcagaatacgacaacggtgtcccccagagcgacaaccctatcgagaacggtcccaacaaggcccacggaatcggcagtgaggtgagatgcgcaccaagtaactccaattgaactctactaacattccacagcccgcagacctgagccgctcccacaaggctgcccctttgccagagcagactggctccggccgtgaagtccaccctggattgcctaccgctggatcggcgcatccccaaggtggtgctgcacagcctgtttcccttgatgagaagaacactgctggaaaataagtgcggtgattttataatatgcggatggcgatgaccctgtatgagtatgatattggtgtttttgatattttgcatacaacatacgtattggataatgcctggagattgagacctttccctttccgtatcattgctcacctcttgccgcttgttgatcaagtaaactgagcacgtgactgctttctccatagtcttgcaattgaatagttatcacaaccacaattacaaatcaaacatagtaattaaaaaaacgaatgtcacacccatttcaagcatcttggccagtgggcattcccgaggttcgcctgtatccgaccgatttggactcggaagagcttgcggatgaggccaaggggtggttgctgttcgtacggctataagactgtacccttcttcaatgataaggttggtatcgacgatttatcttactttctgtaggaagaatcccaacccacgccaacccccgcagatgcgctgcatcaccggcgagccttaatcgagagatgggccactgccagccagggattccgcgaggtccgtatagttataccctaatgttaatgccttttctaatttactctcttttccccctcctccgttttcttaaagtacttgagaatgaatagaaaaaattacgaaaatacaaacgagcagtacagtcctactatcaacgtgccccaggttatgactcggctctcgactaccctccgtccaacatacggagtacggagtagttagttgtcaattcctctgttggcaaccaggctggtccgttgatatatttttccgctccgagacgaagttgctggtacttgagagcactggacccccagtcgaatctgtcaccgatgtctatcatacatacgtattctacatcctacacggcccattgtatgtttcaaatgcgaaggaattgcctgtcgcttcactggcttcggccttcaattagtccgatatgtttcgcggtgctttttggcccttgtcttccttgcacagcactagaagccttcgtactgcgcgatattttcatcaggtcacaacatatttcgttacccatgatgcgagagggaatttagttaccaggaaggtgcctattattattggcaatccgggggaaacttatgttctgattgaaacagggattggcagtgcactccgtgccgctagccccttacatttccttccgcggctagtgctgaagatagatgcaaacttacattttttcatgattcacaacactttgggtttggtaagttgtcagcgagaggtttatatagccgatgctaacagtttattaggaacatcgagttattcccgtctctatatcccaagccaactccctcgtcaaacagaatcaaatgaaagccctgcaactttgctcttagacggagtgatgcacgagatagttctagatgggacttttgatggtacatataatccagctacaaatacttcccgtcttacgcatgctcatctataatgcctatccagcaacttttgcggagaacgcaagcgctactgcacggaacctgaaaagcgtacttgacaacctgaaggatatgtaatgttaagcttgattttactatagccatgtcgggaatctttcgatataagaccgttgagacggattggcaacctatgactagaatcccgagagtaaatgagaaatcccaatgtcatcgagactatcgggtcagtatcatcatagatccttgaaattcacaactggatgtaatattttctaaatttgtctgcaaatatgcacaagtcaatccatgcacaacattatgattcagttatcaatgtccccatcaaggcaagcgtggcggacacaacgcggtcttgactagacaatgtacagtagataaagtgatacgaataatcactaaatcaacaacaaaggtttacatcatgatacacctctttccctcccctctagagcaagaaccaaaagaaaggctaagacggaggattaacgtgcaaaacaatatcaatttgtgactataaatcccacttgaagctcgcaaacaataggactggatactgtgagccgcctagacaccattcaaaacatcgatgatgtcgacggagagtaagaggctagtactcagtagctgagcttctatactccatgatgtctgcaatcaccggaccaagaggcgatgccacagacttgtaataagttcctaactgttcagcggtccactgattggtaacgacgcgatgtgagcattttctagccccttgttgtgtaggtcctccgcgaatggtaccttttgaaagtagtagcttggaagactgtcaagaatcgaagcgtttgtgtagccattccgaaagaaagcaggcgagagggaaatgagttgtatgttcaaatggagttgtgatttccaataagcaacctcactgataaacccttaaagacatcagcagaaaatacggtttgtaggagagatagtaatcgacttcaatgaaagagaagacgcaaatatttatagtcctctcagatgctacctatccaaggctgttgggttacaggaagactcgtcctggtgttctccgggagtattggattagaacgccgtatttcagcaagagagttaaacttacctaggtatgcgtaagcataatgtccacttcatcaagggcaggtgatacaattttgatgagatggggcaaatattagaatttcatgctaagtgaccttagatccatctcttgttttctcatgaacataccgaaagggcgccaccaaaatttcaaggcgcacgatactgtaggccgatgagaaaaagcctagacctactgcatccgctaaactaggaaataagctgcccaggtccaaggactgtatctgactctaagctacgtcgcaattttgagacacattgatctgtgtctggtcttagtttggaacatctatccttgacccacctctaagggaatctaagcatacaaactcaaagacccacaactcagacctcctatcgactccactttacgatatagaacactaaaatgcggggattcgcctagatcttatactatgtatatcgatactatcgataaagacctaaaagaaagcttaacaaaatattctattcctcgttagaatggatctcctagtagccctaaagattatcgttgcgagtcagcctagtgagtgcggttccagggctttgtcctgtaatgaaattgttaggactagctactagcaaaacgtccgtttgcttgcttccaagagcttatcttctgtttactatgtacggtcgccttagaagtcactttaaaagagaatgtgtttcaagctatgcagtcggttttccactgtgatgccaactcaaagtctctcagaggacggattcgtggtgcaaaatgggcaaaccgggccatttatcttttatcacgcactaactggggttctcgtagctgggacatcatctatattggtatgaaacatatttcaagttttcttggataagctaacttctggtatcggcagctagtaatcaagtcaacttttataacgagttcaacgactattcgatccttacattttttacaataaataggtatagaactagaaatattgtcgttgggatatgtctctttgattgtcacgctcattttagtgaggagatcgatatggagtgtaacttcaacttgactaaaccatcgcttactacacctgataaatctagagaacccctaaaatggctgtgttaggatattagagatcacccatccccgtgatctacttcctagtaaggcttacatagatagatgcttcgcttctcatatagaacttggagaaggacgagggctatcccagtagtcaattaggaacattccaatgcttcctgaatcagatatggcgttcctatacaattatcaagcatatcatcctctaagtacgagttgtagattaataacccagcctcgccattaggcaccttatttgaccagaccaaccccctaagggaatattttgtggaggcttgtactcgacagttgcgagaatggtgctggttctatcactaacgcgatggattgccacgagggatggctcacaattgcttttatattggagattttgaggtcaagtcactctctatgagacacgacaaagagcctctgaccgcaacataacaaaaaagatgaagctctccttttccctacgcccgatgaacatgacgtattagcttgatgaaatggggggggggggggggttagaaaaggggggggcggnnnnnnnnnnnnnnnnnnnnnnnnnnnnnnnnnnnnnnnnnnnnnnnnnnnnnnnnnnnnnnnnnnnnnnnnnnnnnnnnnnnnnnnnnnnnnnnnnnnnnnnnnnnnnnnngtgtgggggggggggggggggggggggggggggttagaaaatgagggcgcgatgcttgaggccggtctgagtaatcagagagcgtccaatgagcatctacatagaatcagtgttcatacacgtgactggtctgagctcatctcattaaagcggcagcccagataggaaagccccacacataccgccgtgaatcaatgatgttattcggaggatcaacgacaatatgcgcattctataaatgcgcaggaagtggtggttaaaccctttgattaaagctaagccttaggaagtgataaaaggtaaaatataatccaccttgcctagaggcacgccttccttgcgcaagatgccataggcagtagttacatgaaagaagatattagcctgcataatgcacgcgaatgcaatcccagacaagagttgtgtattacctcccagaggcgtggggctgacggtctcgcaatgttcgaggatgaagtctttgtcaaccgtgtcgagggcctggtgcgccttgtcgatgcgagcgtacatttccgcaaatgtgtagaccacgtcctgactcgtgtcatccgttgggaatggttcggctgtcagcttagccagagcgagccgtgtttgcatggttgctgcgaacacttggtagctaagtgatttcatgtcattgtggagtcgacaggacggaagattggaagcgttgggcgcctcctcggctttgtgaagaatatgcgaaagtgcagttaaagctcgcttggtctggagaacaaagccctcgtaaattgtgtacaccattttggctatcggacttgggggagtgaatatgaagtttgtgtgtagaaatatttttcatctgagacctggggaggcaggttggttatgtagcgtacgatcgtccccaagaacgtgagatgcgcagtgccttgggtagcactaactagttagttatgtgatacgtaccacgtaagcactagtgcgtgtagcattgatctaggttcacggggggcctcgattgagtccagtgatcgagatcgggtgccgtctctacgccaggcaaggatgaaacatgaaaaggatctatataggaaccgaaaatgatactgatttcctggaggtctgtatccggttggttgcccttgaatcttgagtagtgaatgtgaatactcttttgccgaagtactgagagcccgtaggtccgtgcatgtcataataccctcgtatccaaggtctcagataagaaattatttcatagccctcggacgagaccgcatgaatgtgttatcctccttctctccttatccgcaaggagagtgaagtaaggcacacgtctaatgcgtaatactacatatactagaatgagaatcacggctcttattcatatccacaaacgctgggatagctctataaatgtggtggacagatatgtggtagcagcaaatgacaagtgtacggctcggtaatgcgtgcgcagggaataacggaacatgcagaaaaaaaattatatgtttaagagtaaatatggaatgagaatggaaattaggacttcgtagaatcagagcgatcgtcccgatcttggagcttctcactcgccttctcggacttattggcttcgttggtaatggtaatggtcttggctcgcacaacctcgaggagcttgtcgccaacctcgctggcgccctcgattttgctcagtttggttcggaaatgctcgacatcggcttgcattctgtgtgttgttagtatcaaccatgagccgaattcgagtactgaaactaacctcttttttcctgcctccgtatgcacgtcggcctcctggaaggccttcgtccattgatcacggtagctgttgaatacgggcaccatgatcatgctaactgtcatgtctggaagatgcttgctcaagacacggtgtagagtgcccgtctccttggccaatgtttccatgtaaggattgacagcaggagctgctcccttggaattccagtcgatcttcttcatcgcgttcacgtggaccgaagaccgagagctcataatatccaccagcttctcgtggatgccgctctgatgctcctggcatagtcgtttgactttgtcaaactcggccattaatggatttgtctgtccatgccgacggacaaattcccgtacatacgggactaaagcaataacaaagctcaacgcttgtgacgacaacgcgagatgcttagttgtgatgttcttcaggcctgcactacgcgtagcgccggccccaagaatcaactgcgatgaccgcgagttgaacagtttcaagatatctagtagatgcggcgcaatatcctggatcatgctaggaatatttgacatgaggaactcgaactcctcaatgctacgcatcatggcaacagcggagtcaggtagaatgtatttttgctcgtcgatgacggcactgcgaaccttggacttgtctgtcccattttcagcggcagtaccagcaattttgccttgctcatttgtaggatggggaatccagattttggagacctcaacccaggcctcgatgtctttggtgctggcatcgaggatcctagtaagaatgacgttttcggcatctccaaaatcgcgtgcatcccatcgatcggcatccatgacattgacaatttgatggcgctgaccatcaccgaaacgggtaatgaaatcgcggatttgatttccgacaatggtctttagagcagtaccactgcgtcccgagatggcctcacattcatcggcgaacaagcggttgagagtgaagtacctgaggaattgctccttggaaagctgggcggtctgttcagatcgtaccttcaatacctttattatctgagattgggcgatgtcaacggcctgaccaagcagactagacatatccaaaacctgtagaatctcatcctgggccatgtccgaggctgtcggccccatgtgtggtgattttatagcttgatcgatactttgcgggatggggcttcgtggtggtgacttgacgccggaagtgggcgaattccccaagccgctagcgatatctagaaggactttgacttggacgctgagtcgcctaagcgattcgctaatcccggtgtagatattaatcaacattgtataagcatcatccgagtcgagagcacgcagattacgagcaagaattgatgatttctcctgctggcttagctgatgaccgccatgtgttgatagcgataccatagattcattatcatcatcactagaactgggcaggtgtttgcgaatgaggcccttcatttctcgtaaaacagcagttttgaaagaagttgcggctggcatcgtatagcgggcacgtgcgagtccgttgagctgggtgttcaattgtgatcgcaactcgctattgaaatccatataggcaggcgataccgatactccagaccgttgaccacctcgctgccgttgaaatgagtttccccagcgctgcaatgtcacattcgatggcactgtttgaacatgctgtcgtaaatctcccaaaaggtcattcaagaaccgggtctcatagcccatgccaatacgttgacggagctgtgccaggtcgtcagatgctccctcaagggccttgatacctcgcagatcaagaaggcgcctgggggcaccctccttgtcttctaaagtggcgcgatcggagagcttttcaccggccatcagcttttcgacttcctcgagtccctcggcagcttcctcaatgtcaccctgctctaccaatccttcgcaccgagagacagattcaaccacgtcccgaagctgagccacagcagctgccaacattcgtacattttctcttcgccgtctcaaattgacaattttgagaccgccaagagccatttctttatcgattttctgaaggtctcttctgagtacttggatccggttgaccgagtcggcggcttccgcgtgcaattctcggagagatcctagggcagtgaagaaggatttcgaggccgttgagatagacgaaataagatggatctccacggtatccatataccatgaaagcttttcttgtagaatagcattcgttgccagtgcttttcttccggtttgtactggctccgcaaccaatccattggcctgttcatcgtctttggtgggcggtctcggcggccgaaccacatctgatttctctgatatcacatcgaacgtacggggattttccagatggaagtcctcttcgaaataaacgggaggtatagtggagagaggagttaccgcgggggcacgtccacggccagtggaggggcgtcggccgcgagtatcataaggcgaagatgatcttgaagtagtcgagatgactgaagacctccgctcgagagaccatggcattaatgaatcgcgatcagaatctggcctgggagatttagcagcctgcgccggtagtgtatcctctcccgcgccttctttcggtcgttgaaatacatcgtacaaagtgcccacttgcgatagatatggctggaagacctttggatccacgtgcttaatgttggtcaaagtcacaggcgggatatcacgagaggatggaggcctgaagctggcggaggatgtggcgctaccggtcgtcagaccggtgcggatgatcgggggctggaggagtgttgaaatggctacatgggcgttaacacgtcaatcatcgagcaattgaggattcccaaggtcacaaaccattctgcccagactctgcgacagactctgagattgagccatggtagtgagaagagtctaggacacctcctatgctcacgatcgagctcgcggttgatcccctcctcagggggaatcgctgaggagccacatgtggtgatccaagctgacttgttgaataagaaatcgaaggcgacgagaccccagaagccaagctatcaattgattttcgtggactggttgacgacatggctgtcacagccggatcggacagccgatcgttgagatgttctgtgttatctgatcatgacagtggataaactcctgactatagagcgctggcaggctcaggtacagggttcaatattgatcgagtcagcttctgcgattcgcaattttggtgcaagatcacttgggtcctgtgtgcagaatgactgatgtggctttgtttccatcaagctggtaatctccccaatcggccaatgcgctaacgccgggcccgcggttccccgtgctgactcagacagcacctgcctcaggcaccagctgactcagaaaccacttaacgcgtgaaccctcgacgcgtcgcgttggttccacactaaccaaaagttcttgaagcctcccttccgccaaatcatcaacccccaacttgcaatatttgcggtcctctacactatggatagacgcaccccctatactttgagcgtccttgcgcccagcacaaatggtgctgatgaagatcgcaccactattcaaaaccgccttcgggatttcgtgctagaatttcaactggataatgcattcgtctaccggtacgcatcccacttccttgagattccaatgtaggctaatttattattcaacagtgaccaattacggcaaaatgcacttgtgaaacaattttactgtgatattgatattgcccatctgatttcctacaacgaagaattggcccacaaactcaccaccgagcccggcgatatcattcctcttgtaagtttcttatcccgccaatcttggccctcgctgactcgaagtagttcgagctggccctgaagcaatgtactgcacggattgtctaccctgggcagcgagatatcatactaccctcccaccaactgctcttacactcctcggcatcgcacatctcaatccgtgatctcaatgccaccaacatctcccacctcgttcgcatccccggaatcgtcattggagcttcaacaatatcttccaaatcaacaatcattcacgttcgttgcaaaggctgcgactacagcgagaacatccaggtcgatggtggcttctctggcctcacgctgccgcgccgctgcggtcgacccagggacgacaacgatcaacccaacgagcaatgtcccttggacccttacgtcgttcaacacgaaaaatgtcaattcgtggaccagcaagtcctcaagcttcaagaagcccccgaccaggtgccagtgggtgagatgccgcgacacgttcttatttcggccgatcgctaccttgccaaccgagtggttcctggctcccgttgcacagtaatgggtatcttctctatctaccaagcgaagggtgttaagaaggaggctgcagtggcgatccgcaacccctatctccgcgcagtgggaattacctccgacttcgaccagacagcaaagggaaactcagtcttctctgaagaagaagaacaagaatttttggaactcagccggagacctgacttgtacgatgcacttgctcgaagcattgccccgtctatctatggaaacgtggatatgaagaaggccatcgtgtgtctgctcatgggtggctcaaagaagattcttcctgatggaatgaagcttcgcggtgatattaacgtgcttatgctgggtgatccaggtactgccaagtctcagcttttgaagttcgttgaaaaggctgctcctatcgccatctatacctctggaaaaggttcatctgccgccggtttgacagcctccgtgcagcgagatcataacactcgcgagttttaccttgaaggtggtgctatggtgcttgctgatggtggtgttgtgtgtattgatgagtttgataagatgcgtgacgaagaccgagtcgccattcacgaagctatggaacaacagaccatctctatcgccaaggccggaattaccacaatccttaactcgagaacgtccgtactagccgctgctaaccctgtcttcggtcgatatgatgatctcaaaacccctggcgagaacatcgatttccaaaccacaatcttgtcccgtttcgatatgattttcatcgtccgtgacgaacacgagcgtggccgggacgagaagattgctcgccacgtcatgggtgtgcacatgggtggtcgtggtctagaggagcaggtggaagccgaggttcccgtcgagcagatgaagcgctacatcagctactgtcgcaggcaagttgacactcattactgattccaactgctatattcatactaacatcctgtccagtcgttgtgcgccccgtctctccccggaagcagctgaaaagctctcgtcacacttcgtctctatccgaaagcaagtccaccgcgctgagattgaatccaacactcgatcatcgatcccaatcaccatccgtcaacttgaggccattgtgcgtatttccgagtccctggccaaactttctctctctcctatcgccacggaagcccacgtggacgaggctatccgtctgttcctggcatccactatggacgccattacccagggtgagggccaaggtagcaaggaactcatggagcagagcagcaagattgaagacgagctgaagcgtcgcctccccattggttggagcacaagcttggctaccttgcgccgtgactttgttgatggcaagaactataccgaacaggcacttaatcgtgcactggtggtcttgcagcgacgtgacaccatccagatccgttctggtggatctcaaatctaccgtaacggagtttaatctgtgacttattatgattctaatgtgttctgttgatacacctgatatgtgttatgggatgggttgtcgattctgcgcatctgtcgatcttgtaaggcatgggagcttgccagtggtgttgggcgtgttttatattgggatttgacgggattctcaagaacaattgcatatttatttctaattcttccaagaatactgtataaaacgtggtatcttccctatcgtgtgtcttagcttcccttttagacaaaacccgtcactaacgccagttccctcatcgccttgaaccactgggaacgaatgaacatcgtatgaagcattgttcacgatatatgcacaggaccaaggagagtacttttgtgattattatcatgtcacttggcatcggtacggtttcccctttcaatcaccaacaacaattcattgaattcaaaaaatcactacacatatctgcagttttccccaattatctcttcatccagtctttctaaatgagtgcatgtaagccctacgacgattatgcctgggcaataagctcccagatctggggcgactggccaaaacttcttcgcactgatggggacttctacaatgacattggagccattctttgtgaagaatttagcgatcttaaatgtgccctgttcgatttcctcaacacaggcggtttcagtacctgcttcaagatggattcaccaatgattccggcgctatcatgtttcctgaagaaaaagtccggaatgaagtctccatcatgcaatttctctcagaaaaaacttcagacaaaatcccaatcccggtgccttctatctttcgctggacaaagacaaaagagagtcccttagaactgggtccttttatcatcatgaactatatcccccacgagggaagtatgggtgatcttcttgagacgccaggacgccaaccaggacaacgtccagtacttaatccggagctcaatccgatgagactataagcgctatatggaaaactagccaacatcattctctcgctgtctacactttcttttggccggataggatccctttacaagaatgccgattctacgtgggaagtgttacatcggcctctgtcttactctatgaacgaaattgtgcaattggggacgttaccccgatcgaagctaccgatcaccatgtacgataaggcgtcatcgtactttgaagccctcactgagctccacatttcacacctcagaagccaaaggaacgaagcggatatcgaagaggacgtcacgacggatgtcttggcggatgaatttcggcgcaaattcgtggctaggtttctcttccgcaaaattgctcgagatcaggagcagaaaaagcaatggatattacatgatgatggcccatttcctgtttggtatgacgactttcgaccagaaaatgttctagttgatgaagcggaaagcatcgtcggagtggtggattgggagtttacatataccgccccagccgaatttactcatgcgccaccctggtggcttcttctcaaaaagctagaagattggcttgaaggccttgatgagtggtccatggaatatgagaaaccgcttcagatctttcttgaggcaatgcggaaagccgaagacgaggcaatccaaaacaaatgactactagaaggccagcggctatctagtcggatgcgtgacaattggcagagcggagacttttggatcatgtacgccgcaaggaataattttgctttggacacgatatattggcaaaagatcgatcagcgattcttcggaagcacatgtgaatacgagaatatctgcgatgtatggcggaagagactccatctcttagaaccagaagagatagagctcatggaagaatatgtggatctgaaggtcaaagagagggacataattttcgcttgggacccggatgagtacaccgtggaatggatcaagaggatgagggcgatgagaaagacgaaggatatgaagcagaagatggagagagtggtgaaggagtgggaggaggagctagatagaatgacaaagatggagagcaagggggagataaagaggatggagatggggtggaaggaggtgataaaagacatgaaggagatgaagaggaggacggccgcggagtgggaggaggagatagagaggatgatgaagatggagaagaaggaggaaatcgaatagcttctttagacctgtcggaaacctccttcacatcctcttcttcttcttccatgtagtgaatttagttcccttaaaaatcatattttcttccaggtgaatgcaggaaagagattagaataatgctatggtgaagcgaggtgatttatgtccggactgcattcattccaaagttactatccgatctagacgtgctgcttgtctgtattcgagagggaccgaggtcttagtaggatatcatatagggtagatggacatacacataccaatagcgtaggaacagtcctaaatagttgccagctatttgagccttaatgccatctgtgtgataactccgccttctcgtcccgtcaacatatcgattccatttcttgactagaccgcgctagcctagaacctggccactcttcatagggtaagaatcgaaatcaaatggagcgagctccatcggcccttcgagagctatgcaatctgatctgatgaagcggatacaatgaatggacgtggtgtagccacgtcggtaagtctgtttcggcactcgaactacaaccagtgggacaaatgctaattcaatccacaatatggagtatgtttcacactgatattgcctacaaacctgatgaatacttatatagaagctcattcatacccgagacatatatatccaactcgaaggatctcaacggacttggagagtcatcaactcatttggaccgctgcagctacttcaaacatcaatgccattaccactgctgatttggtacaatgtcttatcgaacggaagtttgagctgtttgacatcgacggtagcccagccgaacggcttggctattggatctcgatcagggccggaaccaaaacctcgagggcctggttgctaatcgcttcacccacaacatacctataataccttacctcctctttttgaccaacctcatcgacaccaagaataacttctgcgtcaagccaggttactctggatgcgatttgccgaactgtccaacatgccgcgcacgtgatgttggaatgactaatattcggtaaaaggggttttaaccaaatgttaggcatttcagcagccgatttacccctcaactagcgagtgtattccgtatgtacggaatagcacggtgaacctctattttttggcttttctctcccggaataggagacaaaaatttgggatgatgcgttgtcaatcttgacatgatccacctcagcccctccaaaccctccaaaccctcccaagtcacagggctagccttatccagccacaggtcccctatacgccacttgtgaataaccccttcgcaatgtcgactgccaagaactgacaacatgaggctgcatccccaaattgacttggctctgttcagctccacattgtccctattaggcaccagcgtttctcctcggtctattcgaccttcattggccatgtgtggcccacgtactgtggctgtcattaaggctgtcacgggatcttgcatccttggcgcgcatgcacagtgcaacatcaggacatgtcgctcgatcctgtggctggggaccgtcggaggtgtcgccatgcgccacgataactgcacatcaagctgatttgctctgtcctcttttgaaccggagaccccgccaagatgacagcttggaatgtttacagtgctgatccacccactgacgtggacgggcggtgtagatggtcccgttctgtcctatccacagctgtccaccctggaaacactaactcgctaggtttctttgtcctaaaaagcctccccgcttactccgtatacggagtacaatctccccgctttgccaatgccggtcgtcccaatgaatgctccactcgggccagctgccatggcgcaattgaggcagtgcgacgaatgagtccaggacaagtgtcggacaggaactgggggctgctgcatgattccttgtgtaagcccgtatcgcaattcggggtgtattgacctcgccgtatggggtatataaggacagtccccttccctgaccacttctgccatccagaagtttatgatacatagtctcttacactctactctacattattctctcccaaatcgacactatgagcttccacgaatctgcttcccacatcgagcttgtggatggccacatcctcagggctcttcttcgcactgagaatggtgatgaggaggagtccactatcgatctcgatcaccacattggaaacgacaatggtatgttgctctgtctttgtcttgcagtgcccctctacacgaccatagcaccagttagtctgactcgtttatttaggacacttccactgggatggcggtgacttccacgccagtgccgaaaatgtcagattcgaccgcgaaggagaatatggcgtccctgtcctccgggctgtattgcgcgacgtcgatggcgagggacacgatgcggatatcaacctgtccgagcgcattgggaatgataatggacgcttggtcttcaactagtgggcttagacagctctgagctctagggactagcctcatcattattgctattgtctggtacaattagatacaatatacatggcagatctctaataacttcctactgttgttgctggtatcacgatttacgttaaatttttgctttactccattatgtctcttcgcatacaatctgtcatatatatcaacgatttagtctaatactctggttcatttacttatgtggttagttggagccgataaatgtcttttgagtcgtttcggatgacttttacatggtttgtccaatatccataaaaaggaaattgttatgtttctaagtttctttctttatttcagatattttcctccatatcgcaattcactcgctccttcccttttgcccaccttccttcactgcctcatatgctcatcttcctctcccattatgtgtctgatgaaaatgccattttcaacgtttgtcccctgcttgatgattgacttgcgattctgactttagctcctgactcttctttatcgcaccatcgtccataacccatcgagtgaggcaaatattccctaaattatcgaagcctcgtcttgcctcccctggaatcgtaacgctatctcgccctcctcaatccagccagcccatccatatacaaggtcaacagacagaggaccagctctgttatttggaaggcgaagatatagacattactaggatttccgaaccaagccgacatcacccctcaatatggctgtgaagccaaaaggctaggactataccccagtcggcctgccatgtccgcagtcatataggtaagtacctgatggtataattgttatggtgtagtagcaagttaacccattaaaaggctcagcgaggatggctgtactgtctatgggcttccggaagacgcttgaaatcctttaagttcccaaatgtcacccacaaccacataaccgtgtccagatgggcttattgaacctcgctctaacattttggtctctacacagaagctgctcagaccgagatgaagagaaaagacttggcggccaagttcaagcacagcaataagataaaccttgtcgactacagttggcaatattattattattgttgagacaggcgtgtcagatccgctaagttaactacggcaagatgcagaaaagtgatttgcagactattgctgccatgctaggattgccataatattgattatgaagggcctacgtacacgaaggacctagcagttatggacgctagtgctggcatgaaagtcatcggagaggcagatacgccgtggtcccaggatgggatcacttccagaggcaaacaatgggagtgatgctttttggggctgaacatgagggcagaattggctggatcctgggtgttggccaggttattcgcgttgggaaattgcaatgaagtctatccattctaaataccaagaaccaacccggtgccgtgcacgaaattgtactccacaataagagtatccccggaaatatacgaaaaagtcttggctagtgacgttcatcggtgcgtaaggccgttgcatgtaaaatgccgagctagctcggatgtgggtggactacctccaccatacaatgctcaccaccgagtcaatagaaatacggctttcgaataaatgttgaaataattcgttgaaatctaaccgtaatttgacaattggaatgctgaatccaatcactggaaagcggaagaggctgtttcccgtgatgcagacaaatgggaaaccactcgctaacgtataagcattgccatctgccaataagagatagtgaatgaaggagattcataaactcggagagaaaatggggtctctctgctagccatatagggcgttgttatggagttgagaattaaggtttaactgtaatcaaataaagctattgcaagggtaagtgtcaaaataaggtccataaagtatgtcggtagagtgcagatccacgtgcgtcccgcatttgtgggtccacggtacggaagtaaaccttcgaagggaccgcttgaaataccgtcttaattacatcatatctttcatccttcatcttttatccttcatccatcatccgttgcaaaataaatatctattgtatgtttcccctcccttcatcactttcgacctaggcacttaatacggaggacattgggtttttcgacgacttctctggcactgtggtcacctttcagacgaatcaaaacaccccttggacccaaacatgggtcatcgaagaacaactatcagagcgttttcaccgtgttgacgaagtggatgtggcccgcaaactcgggccatcgtgagctacgatagagttcgaatgctaccgcgagaatgacctcaagaaaggcgtaatgcgtatctaccttcaagtcccaaacttgaaaacggagttccgaacccctcatcgccgcgcagaacaggcgattgcatcaccaacgcatttagagattgagtcactcaaaaaacttcagcttatgggctctaccgtagcaccgaaactcctcgccgtgcaccaagataaacaaagtgacaccggttctgtgccaggggggtatatcaattaccttgtgtaggagaaggttcccggggagagcttcgacatcaactggttctgggggctctcagataagtcgcgtgctgatattcgtttgaagttcaaggcgctctatcggtaaatatccatacttccacactgatgaaacatttagctaacccatgacggaagtgaggttctagcgtttggcattcaaattttccccccagtgccatcgaaaatcatctatgactttgagactggtaccatgtatttttaccttttcatatttgtctatgttatatgatttatacttagcaacacattctaacctgattctatttaggcaccttcggggtcttgtaatggccacagagaagggagatccgctgcaatgggatgacatattatatgactagtttcatctgttaaatgctcccaatctgaaaagttaccagggaggtcctgactgggtttggtagaggaggatgtttcattgccgtgactactgagccatcaatctaagtgatgtgatcataaacaaagaaaacatatttctattgacttcttttctgccgactagtagtagtaatacgatttcctatatagttacaacccagtcatcatcagggtgtcgttgataggttcgtcaggtcctgactcagatgcacgacgtgccatgtgaaaaaagcattgtttgacactaacaatggtgcctgggttgaattctgtcttggcctccttgatttgcgaatattcagccatccatacaccatcgaccagttgttgacgcaaaaagattgtctgccagtaattggtcatgaagccgtagttgcaactgaggtcgtgcatgtgcatcaaaggttgtgccagtaaatacctgaggcggttgccggtggcgtcggagaggtagggcctgaagtcatgagtaggtacccatgatacctttagctcccccaccatcctcacagttgtttgattgtccaaggaaatgacatcaggggtatgcctgtacataattccagcacattgaaaatcagcgaaagtcatttcaatgccttgagcctgaagcactgctccaacggcatgtccaactgattggaaaaaccgacctcgaactccatcttcatttccagtgagtacaatttctgggactggatctgtgatgcccttccgggtgtaggccgcagaactccattgttgagtggaatatgtggccacaacatccgtttcgaagttatcccgttcctgtatgctaccaacaaacctgaggctgtggatggtgtttgttatgcttgcaaatgggctttgtgaagcggcgggagaggcccgagaaggaggtgtctggcctcaactttacgagccatattcagcaaacctgtaataatcagctgcaatcagttgaatcagggtggggattagactcacagtctagtgttccgtggatagcaaagcccaccgagtgtgatgcagctgaggtacaagggtgccttataacaaagcttgatgaggcggtaataggagagcacagaaagtaaaatggtaccagaggtccctagtgataaagtagatgtggagtgtgtcccgaatatcgcggctgatgatcaggcttatttcgaaccatgaatgtgtgatgactttcgctgattttcaatgtgctggaattatgtattgtaccagttacttattgcccgtagagaattattaagacgtacacgtcgaaacttggccttctgccaggccaggctcagggaaggtattcaattattgaaaggaccatggccttatccggctatagtgcctagggcttcgacataatagggtggaaactggcaagcgggcgggttagaggaatcccatctcctgttccgttagcgtgggatctagagattcatgatgaggaacactatttggtaggttcagccgtagcctgagtgggaggttccataagagcttcagtagcggctcgtaccaggtctggaagtattctcggcagctccaatgtcaggctggtcaggaagttcgatgacaagctcattgggagattcaaagagtgctcatacccaaacggggactccaagatatatcatgttacttgacaaccatctcaattttatttcaataagcgtagtaaatttgatgaaagtgggagtaaataaagaccatatagctttagccaggtatctgttaagtttaaccaaaaggtaagattttccaatgaagaccccttataggttagtggttaattcgttggaattagctgctacgagctatggttgatcatgtcgtgattgggaggtcagttggatgggttaaatgccttggttcgatcctaggagtagtgaacttgtctaggggtgattcattttttttcgctccttacatctatcttataatattccaccagtaagcgttgaaattttgattactaccactctcaagacagctcttcaaaaagtctcctatattagtcgaatgccctgatgctatgatagattgctgtcatatgctatagattgtttgctagatagctaagcgggaagggttgaggtttgcaccgtttgcgaagggtcagctatatcaaccggctgcttctcacttcccacttgcatcttctttctttcctcatcttcgttattgagttaatgtactctttttgctttatgatcgatctggcgcctcacagtaagtacatatctgaatgacccctttggggcggacactgaaggctaaccaataagtggcagcagtcaatcaaagccccgtccgaaattgatacaccctcgacgagaatttccagagttccaacaaaatacaacgacggttgaaaatttaaatacattgattcgccggtaacaacaaagttggttagatccagcgtggaactagccagtgaagttcatgggattcatctaccgagatccaatgaatatggcatgtagcatctacagatttccagtgcccgcaaatgcttgcacattacttggaattggtggctcgatacgaacaaagtctggggcagcgactgtagtatgcaagagaataaaaaacatttcaagcaccaccacacaatgggttaaacaaggaacttcttacccagatcctggaacgattaaacttttcgctgtttcctatgacttacagacagcttgtgaggcgatcgacaaggaacatcccaatgttccaggaaatggccctatggatgatgctcgttcggcgaccatgccagtgccactcaatatacagtgtctcaccgcaggtaccatagtccaatttgattacatctctacgtccataccaatactgcatcttttccaggatgaccctggcaatgtcgccaccgacctcggacgtggaagagtcaatcaccggccgatagagtggctaaaaggccatgtatgagctttgcatgagaacgaagacctcatggccaatcatagaatatgtgacgggcatgcctacacagcccgctccatacattcctggtcgagctcttttttcccacctggcccatctatgctcccagtcataaacgaaatcgccatccaacaggctatgagcgaatgtcacgcaaggcctccaaagtactagttcccagccacacacaatgacgaaggaggtgttcgtcttttctgataacgctgatgtgcttaatcgcactagaggcgatcttgcatatgaactggagagcgatgtggcaatcaattggagataattgctcggcactcggagaaattgcataggctgggtgtttctatcgagctgcacttgagcccaggcaattccggtatgccaggcaatgaagtcgccaataaaatggcaaaaaaagccatgtacgagctttgcatgagaacggagacctcttggccaaccatagaatctgcgacgggtatgcctacgcaacctgtcccgtttattcctcgtcaagtccctctctcttcttcgctttttacccgcaatacaagtaataagccatcaccaattatttggaactgggcaattaatatgttgaatagtaggagacaatcctccatttagatttgtatgttgtcaagatagacgtgggtatacatcgtagatcggatccacgggactgtgcctgtcggccccacatattccacatccgatgtgccccgctcggacgtcactccaattctttttccactccaagccttgtctctctcaattacctgaccgaaaacttctcaattgtcgctcctctcctgcgttgcgcatctgaaattctgacatctacaaggtttccatcaccctcagttactcccgtccaccgcttttcgcatcttcccagcgcaacccaaagacacaaccagcctccgacatacaatccaagaaccccttctccgccatggcacccctgatccgagtcattggatcactcaatgtggatatggtctcagtcacaccccggttcccaaacccaggcgagacaatcacttcctcatcctacttcaccagcgcgggcggcaagggtgcaaaccaagcagtagcatgcgggcgtatgtcccgatctaagccaacaggcaccgccaactccaccagcgatgtcaaagttgaaatgattggcgcagtcggcgcgctagatgcccacttctccgctctgctcaagccgaccctcgagagatccggagtcgacccgtcccgagtgaaagtcatcgagaacgcatacacgggtgtggcggtgatcattgtggactcgtcagctggcggggagaaccgcattctcttctcgcctggtgcaaattacgatggcatgcagcctaccccggaagtgctgggtatggcgctagcggcgcccgtacccgatgttatcgttatgcagggcgagatcccggtcgaaacggttattgggatactacgcgagatcgcagcttacaaggccaaggctcgcgctgctgggaaacgcggcattgagtccggtccggatgttatgcttaacccggcacctgcgccgcctggtggcttgcctgaggatgtatatgctgctgtcgaccatttgatcctgaacgagacggaggctgagctgatgactccccctgcggaacaactgcttcgcacggttccggacgcagagggcttggatggcaaggagaaggtcgctcgatatttccacaaattgggtgtcacttacatacttatcacgttcggcgagaagggcctttggtacagttcggccgatgccggctcctctggacctagtgatggagtgaaacgcttcactaatgatattccagccgcccctgtctctcatgtcttgaatactactggagcgggtgatacatttgttggggcctacgcggtcagggtggcgcggtggcgtgagcagcgtcgcgcggatggcaaggctgggcaggatcttgccgatgacgagaaggcataccggtataagactgtcatggacgaagcgatgcatgtggctgcgcgcgcctcggctcgggctgtggaacgtcagggtgccatggatagcattccttttgagaatgaggtctaagctaattggtacgggaagtctgtggtaatgtgcatcaatatatcacgagagactacagactatgtatatagactattccggtcggcatttactgcctgtagtagaatgccgacgccatcgtacgtcgatcgaacaaaggataggctcttggttttcgcgagtaatgcaacaaggatcagtacgccgaggaaataatccgagcccatgagggacagggggcgcatgtgccatcagaccttgcgaaccctgtccctgtccatgtaatatccctattaataataaccctccatcattctacgccttggacagccttcaagggcaaattcctactttgaaccacctggatagccagtccagagaacattccccagccttgagtgcacacccagacacctccaaccctcactctgagacggaactccgtaaaatgtttcacaccgtggaaattcacctccaacatccggcagcccccgatcggcctatgcatgcatgatttcatccggtaatctgagtccgaatgggggatagataaccaatggaaacaggatgcgttggcagtttcattggacatttcatgcaatttactattagcggaattgtagactctagttatcacgaatgagcggacaatacgcaaggaagagacttgaacgcgaagtcgcgcgcgaatgaacgtgcaagacgtggagaacgtgagggacgtgaaggtatttggtacttacgcggtgtatgcgctagtgccaggatgaccgagtaccgggtacttcggccgcatgaccgacgcgtccaagggatacgcgactatgcagtgctcagcgggggggaattgaccttttggtctttgctccgatgatttcggtaatgatttacggaggacttgtacaggcaattataggggaatgaggaattcattgacaatggcacagtgatatgaataccagttagatcatacgaacagcgcgtagtgatctgcatagtaccattgttcccacacgagacacgagacaagacatccaagaatgaagtcaattggattgtgctgggagctgggaatcggcataaacgccactttttcgaattggcagcctccacaacgtgaacgcgacgcgctttgccggcgtatgcaggccttgaaatagttcccttcgccctccatttgtgactcctcatgttctttattattgctccttgcctctaaccctctgatttcaagctcttaacgcccttaacgtctgaaactattatatctatctcatcgctgcacgtcttttaccccgaatcatccctcgttctctctcttaacggtgtagtcgaccatatcctacccatttcattatccaacctatatccgaccagttccgatcattgaatcattctattgcttttgaatcttttgtcttacccaattgccctctttctcttcggatcgtgcgatcggcctgcctagtgcctatttcagaccgccaatctcccccacttggtgctgaccaaaacaaaacatcccccttcttccttcaccatggccactctcactatgactcctactcgtcagcctttgggctgcttggacacgatgccgttgatgcgatcgaaactaaatcgtcagaaccagcaaaatggtacgtgacgacctatgttttgatgttccgaagacggcttagctcacaatcccaaccaggtgccatgtctatgaagtcaaccccaatgaagagctcgatcttcatcgacgccgattccgagaatatcaatccagcaagcttctccgccaaacggaagcgtacttctgaggacgacgaggagaacagcgcgtcgaagcccatcaaaacatcccgcatggctctttccacccgcataaacatctccccccgtctctcaaccccctccaagctctctattacaactcccaaatcagctcctattctcaagccggctggtcgctctccaccacccaagtcgagcaagtccgccactcgccgttcgctcatcgccaaaccccgctcagagcaatatagcaagcgcggcgtggctcgtcccttctctcttgcttctgtcctcgctcaatccaaaacttctaagcctacgcctgcccccaaggccccggcctcatggtgcttcgatatccacgtcgacaccgagcaggaagaaatgaccaacctgatgcatcactcgaccactgtccttgatatcagcgacgacgagggcaagtccgacacttgcccccgtggaaaggagaatattcctcctcacgagctgggcattgaagtccctatcgctcgtgagtccactgccactattcctgccgtcgctcgcaagtcgaagatggatgagccgcgtgctgcgctcggtgagctcgatgctgccgaatactatgccgagggctgcaatgctttgtcgtatacgattgtctatgatgatgaagagcacgcgcctgagttcaagaagccctcgttgcctctttcccggagccaaaagaccgttatcactacctccattgcttctgttttggacgttgttgctgccgaaaccgagcgccgaagccttaaggactcaactgatagcaccaagtctgctctttaatctaacttctcgtcattccttgcgtctgcatctgcatctcacggcgctgttctttggccagggtttggccccaatacctatttgcttattctttggcgtctgtctttccggagcatggtgtttgtcgctttttggacactggtgttcagtctatcgggtgttttgatatagcgcttgaattatgtatctgttttgcttattattgcgaccactcgggttgacttgctttatcctgtctaattgatgagttactctctgtgttatgtcttatgctttacgatgtactccgcgtctgcctatgaccctagcaacgataaaatgattattttgatgactatctcgatcacaaagtaccatttcctagacgtagccaatcatctagtaatttagtagcgtctgagtcaggtgacatctcgatattttgtgcagtacgccgcaattcctataccgatcagtttgattcactcgacagttcctgtctcatgaactgtgccacgaacctcgcctttggaaaattttacgcattctactacacaaattgagtatatcgttgtcggtcgtcacagctattgcccctgaatcagtcaaaagacgctcataactacgcaaacagctcaacgagctagatccgatccgatcggcttttcctacctaccatcggccttcttctggccctccagtggagtggcactgaatactcttggaataacccttggatcatcgttcttttcgtacttattggtgttcttctgcgcgcctttgtagctgttcagatctgccagaatgagaaggccacacctccgcgtatcgtccgaaatcgacacatcttgtcgtgaacctggtttgctatcacgcttaatggtgctgaatttgtctttatttactacctaggctcagtccatggcggctcggtgttcgccaaagctcaatttctagctccctttttggttacaggcaatcaaaacggcctcgactactaaatcaagtgtaatgaacctgccgagttatcgttgcagtcgttgccgtgtctattctatccggtttcctcgttatcatgcccgattacaatccaaccacaaaccgtcttcggtcacattagcgatttgaggccagcctactcagtaccttgaaggcagactcggggagtggcggatggattggctaccagattctagttagaatcggtgccgttcttggattgcaacagccgagccttttatgtgggcgtgggtttagcatcgctttccttcgttggaacgatcgcgttggaacttaagtctgccaataagccgaggaacactatacccaatgatgacactgcaatttgagtctggatgtgtttgggggtttgaggtgtatatagcagagctaaacgatggcatgacgtcatttccgggtcccatcgacacctcgtctccgcctctaggtatcttgttagagccaagcaacgaggccatcgctggggcaggctggattgaagtgtcagcgaggcaagttgccttttttctctcctcttcttttttctcgccacaaaaccttgagggcgcatggatcctccttggcataacttgggttttgactcagcttccttaaagagtaaaagggcaacctgcattggcattttcccaaatcatgtggaaatagtacacgaagaagtcccttgcataatgtgacccatctgatcggtacataccaacgtcgtactccgtacgtagcacgaggcaatggaaattattaagctgtgacacataccaagcgggatatttaccgccactgcatgagacacgtcctctacagacatagtccgggaggaaaatggaagcatgagctattgccattgtcgtagaatatagggcccacactttcattgggatgatctttagacaacactccacatctctaactcacttcctttctggacaaacactcgtatcagtataccacaatgacagtctcttccactgtccagcctctcaaggcctctgtgccagcggttgcacaaacggcagatatgcctcatcgtacactcagcaagtcgatgacctttgccaatctagaccaataccaatattggcatgccgtcggtcctatgctggggaggatgctttccaacggcaactacagcatccatcagcagtatgaatatctgtgtctcttcgcacatatcataatcccaaagctgggaccattcccaggcgggagggacatatacaaatgtctgctcggaggcaccggctccgtggagctcagtcagaatgtccagaaatcaggcttgactgcacgcattgctttcgagcccacaggctacattgctagcaccggagtcgacccgctcaaccggcacacggtgcacgctaccctggccgaattgagggctatcgggtctgccaccatcgacatggagctgcatcaaatgctcgtcaccgagttgacgttgacggaccgcgaggaaaggcttatgtccccgggacagatctccggaactgcgtggaagacgcaaattctgcttgctttagatttgggacagtccggcggcatcacggtcaaggagtatttctacccagcactcaaagcctccgtgaccgggcaaagcgtggccaggttgtgcttttctgctattcggaaagtggacaaggagggaattttcgaatctccgagtaaggtcatcgagacctatatgcaaactcaaacccagacagatctctactttttgtcctgtgatctagtcgatccagcgcaaactaggattaagctttacctcatggagctagacatgaggctggcaaaggttgaggagcactggacaattggcggcaagctcaacgacgaagagactttacttgggctgcaaatgctgcgagagttgtgggtggagtttgggattattgagggcatgcgcaatgagccggagcggccatcgctgcccggggatcccgacactattgttccattcatcatgaactacgagatgaatcccggcgaggtattgcccaagcccaaattctacttccccttggttggcatttcggagctgaaaattgccaacgtgctcactgcattcttcgaacgctacgatatgcctgagcaggccgcagtctatcgcgataatttgcagacatactagtaagtttattctgctgctacatatcgcaatgcttcttgctaacctcgtgttatatcagccccagcaaggacttggctgtcgcaacggatcatcaggcttggctgtccttttcatacactaagaagaaaggaccgtacctgactatgtactatcactagagattttcatgttgatagtcaaggtacgtttgaagcagacaaactagcgcggcttagattgagttgggatgaaataaatgcgtgaacgatgtctgttgtgtgtaatttagaacatactatatactacctggcagttgtgggctcgatgaaaagcgtaccctgcatttctgtacctgcacttgtcggaaagatattgtgcttatgcatcgaccattatgttccgatcacaccgtgcagtgtgtcgatgcctgttcgttccaggaattagtgaatctagcacatggcacacctacaccgctgcataatgaggtattcgaatactccctacaaactgtcaccagccggcagtaaaatacaactgattcacaagcaagggggtattaaaaattctgtagcgcatggcagttttcagctgggattgaactactaagcctatttagaaaaaaaaaaaaaaaacgctcaaaaccaagaatggctcgagaatggaaacttgcaggatagtgacatgcaatatacaatgtcatcggaggtaagaatgtgagatggtatactagttccaacgtaattagacacgtggatagcccgagatagaccgagagcactacaggcagccacggatcgggcaggatgcaagggggatttgccacggccacggcccttctggatgcaataaaagaatgaccgccgagaatcagatattacctacatctgatgtttgcctcccggcagtgcattccatagactatcgattgcctatcgatctccgtcgatccgggttgcgagtgggactgagagaaggcctacttcgagatcacgcgacgattatatgtcgctgcatgcaagtctcatggatcaagtacggcgtggtcacggctgctagatggtagtgtgccgacgaaatttggagagagtcaaaccttactccatacaagatacttgagcattcaactggtgttgtgaaatctgacttgtcaaaagccaggtggataccccgttgtttgaaaatggacatgagcagcgaacaatattcccagtaggaatgcaggagcttcaataaaacaagttcaaacgatcaatataatctcaatctggcttattaaagtagaaaaaagcacatatactatatcgcttccaggataatctcctgctcggcaaccttgaaccacgcttcgcctcgtttccgggcgtcctcctcattcacagcagactttccagcggactttaactcgtaattttcgacggtgtacgcaaccagcaccttgaggatcgtatctgccaaggcttgcgcaatacactggcggggcccgaagccaaaacgccaaaagcgataccgaaagctggccctagattcctccaggaaccgccggggccggaaggtcattttatcggagccccacgcgtcatcccagatattcagcgcattggtgtcaaccaccatgaaggtcccacgaggaatgcggtatccacccacatcccggtcagtgggcatcgattgcgcataggtgtagttggtgactggcttcagcctcgcagattcattgatacaacttgccagcagagtggtgttgctggcaatgtatttgacccaagactctggagttgtgtcggatctggtctgtgagatctctgctctaagctcggtctgtaatccgggatcctcagccaggaattgtgggatccaagagaagctgccaatcgtcacatcgatgttggcaaatagtgcttcgtccaatgtatgcatcagctcggttggcgtaatctgaccttgttccacggccctatacaagccaacaatagcacaagcagaggcatcgtcacggttcattgcatattgatacgccttccgattgaagttagcccagcgagcgtggaagacgtgaagcttgttccttatagccgggtaaaatatcttgctgatggaaaagagtgacagaccacccttgaaggcatattgaaacacatcggtgcgcaaatcggtaatgtgcaacagctcctctgtcatctccggggacaagtttccatataagaggtcgctaatgacccagaagggcagaagcttgagatcctcggcgggcttgattcgcagcgttttcctgccttcatactgcttgtataactcggacaaatggcgagaaatacgggaatggacaaatggaacgtatgtcgtgggcttctgggtaaagggtggtgaaactacagcatggactcgtttccagtgtccttgactgatcagaccgacaccatcgccgactagatctcccattacccatccaccatttaggtttgaagccttgtggtggttaccagagtctttaaagaccgtcttgatctcatccgcgcgggtcaaaatgctagacttcatttagcctgagcagttcatcttgaagagagcgaacttacatttctggcgtgagtccaacccagatgcgatacaccgggccatatttctcggcccactggcgagagacattctctccttccaggaacttgatactccccccgccatctggaaatcggtagggacaagttggaataggcgttgagccatctgttgaatatattggataccaccagagtaaaaatctctacgttggcagtcagcagagttctgttgatgtactttcggggtattaccgacattgattatgcaggacactactcgatttgaccaagtatttggttgaaaggagtgccacaaaatgactaggagtgatacaactgccagttgcagcgtaagaagaatgtaacctgacatcatgtggagctgacgttggaaagaaggaaaagtaacaaacggaggatataaatgacgattttgaattcgatttgtaatcgatagcatgggtgtaacttcccaaataggtacgtgcggtgatataaaggaacttattacagttcccacaagtgcggctgacaatccgaaacgacatcaccgagtagccagcatcttacatgtacgaagtacatgtgggtccaacgttgatgcacaaggacgaacatgcatggtcgcctcgcgttgattccagcgagcgcatggtgtgttatatgcaagggctagtgaattgttgcaggtgtagccacgcactaagaataattggtggtcagcctcagcgtggcaactataacgacattctttctgctgacagctcattcttggctatttttgaagatatatcgggagaggtcatttggaccgaagtgaaaatgtaccatgtacttgttaccataaaagaaccatcatctatcggaggaagcttgatctcttagaatattgtccaccatcgccatggattcttatcatggtcgtcataatatttccattcctttgggcaaggaattggaagtgaaatgcactgataatggtgtacctcatcttctcaaggcatcatgggccttgttgcttgccaggctctcagaaacgcaaacgacaacatttgcagtattggaacaaccggtggtccctcgggatgcgtgttcgaaattggtggcttcatcttcacatttagagacatgggaaatatcagacaatccggatatacttttggtggatgcagcgaaggaaaagcacagagaacctctttcaggcacacagacctcgacaggtgtggtcatcaggtggcatgatgcaccgaacagtccaacctcggtaagaaggactcgatacatgtattcttcgcaatttactaaaagagttccagttgccgtgtgcattcaatgcaatgattgttttgggttgcagcagatcaaccggtcaagtatccttggaatacccaagaacatctctcacagtgaaccaagcctggtcacaattgacggctacacttcacattttggaacaaatggttatgaccccagggttatcactccgggaagtggatttcctgggctcatatagcagcaggttaatccagcaatggaacaacccgtatacactcgcacggccacaaatatgcattcataccttgatcctggagcattgtcggagccaacccgatgccgaggcactgtgtgcttgggatggttccatcacgtatgcagagcttgacaaattttcactcgcagtcgcgctccagctgctgtcaattggtgttggcccagagtcagtggtcccgctctacttcgaaaaatcgagctggacggcagtcgccattctgggagtgttgagagcgggaagcgcttttgttctcctcgatccctctcatcctatgacccgtctggtcgatatttgctcggaggtgcaggcaaaagttgccatagtctgggattcattgcaggagctgggtcgacagctgggtcctcgagttatcactctcctcgacacaataaaaagccacgtcgatacaaggagaaaccccttcaacacacaagtcaagccttcaaatgccgcatacatcgcttttacttccggctccaccggcaagcccaaagggatcgtgattgaacaccaatgcttcgttgcaaatacgctggctcagaacgcagtccagaatattaatcaccaaacccgggcgtttcagtttgcctcatatgggttcgatagtagcattcttgaaacactcatgaccctggtggcaggtggttgtgtttgtataccctccgaggagcagcggctcaacggcctggcagatgccatccgtgggatgcgagccaactggctcgaactgactccatctgtggcacgattcatcaaccccgaagaggtaccgcacgtaaaatctgtcttgcttgtcggagagccgatgtctcaagaccatatcaaacaatggtcagggtcggggaagatccaactcctgaacgcatacggccccgccgagtgcagtgtggtagccactatccagccccatgtggaagtggaagatcctcaaaatattggtcgctcatacagcagtcactgctggatcgtgaatcctcaagatcatgatcagctcgagcccctgggtgcggtgggagagttactcatcagcggaccaatcgtagcccgaggttatctcaaccagccccaccagaagtctttcatctccaaccctcgttgggcgacgcgattcggcattcctccaggcgaacgcgtttataagactggagatcttgtgagatataatgtcgacgatggcgcgctgcgatatgtggggcgcaaagaccgggaggtcaagattcacgggcaacgtgttgacctgcaggaaattgagcatcatgcctcccagtttcagaagggaatacttgcagtggccgatgtgatccaagtcaacggtagtagcgcggggaaactccttgccttgtttattgccgctgataatgatgatactcgcccgacgaagcacagtttcgttgtccccattaatgacaccctcctcgatttggtgaccgacttgaaacactggctgcgtgactgtctaccaccatacatgatcccaacccagtatatgttcgtcaatcgctttcctttaacgagaactagcaaacttgatcgacgagccttgatcgatcttgcagcatccagtcacccgccgtcaggagagcatccgtcaaagcagcgtgatagagaagatgtcgagctggacccggagctttttgccaaggaaaatatcttgtgctccgtatttgctgaggcattgggctgcccggaacggaacatcggagcagaggacggtttctacgacatgggagggaattcattggcggctatcgagctagtagcccgtgcacgcaagcgtggcctggaaatcacggtggcggatgtcatccgtcttcagagtccacgagatattgcgcgatgtaccgtggaaagcaaaggggttcatgagatctcgccattctctcttctcgtagaccccgagcagagtctatccgccgcgacagcccagtgtggcgtggagagagcaacgattgaagacatttacccttgcacccctctgcaggaaggtctcatgcatctatccatcattaccccgggagctttcatgggcacataccgattctccttggctccttctacgaaccttcatcggatctgggctgcatgggaacagctttggcttgtacatcccatcctccgaacacgcataattcaacttcaggatggtcaaaagcttcaagtagtcatcatgcaaaagcttccacgcaaagacattttagtcgtggatgattgcgagccgatgagcttggggacaccccttgcacgtttaacatttcatcctggacgggcttgcggcggatctgactctggaatgttcattttgaccatgcaccacgccctttttgatgggtggtcatatttgcagctgctcgaggatctccaggtgatttataatggggacagattgccaccacgccctgccttcaatcatgtcattaactacatctctaatttgaagattgaggaaggtcactctttttggcgtcaacagttcaacgatttacaagcaacaatgttccctatctcttcccggcggtcaatcgcgttgccacattggcaagtcaaaagccagcaaattatcctggccaagtcggatatgaactggaccctcgccaataaaataaaattggcctgggcccttgtgatctcttcccaaactcactcggatgatgtagtatacggattaacagtctcgggccggaatgccccagtaccagaaatcgatcgtattgctgggccaacttttgcaacattccccttccgcacgcagcttcatgaccagatatcggtggaagatatgttgatccaaatgcgacatcacgacgtctccatcatgccatttgaacatattggtctcaggcgtatcgcggagtcaagcccagacgcagccctggcttgtggattccagaatcttctcaccgtcaggttgcaatctcttcagattcctccgggcgccttgattgatttacccgagaatgaagatcatgacctgaaatttgcgtcgtatcccctgtcaattgtggcccagcaggagggcaaattgctagaggtcaaggccatctttaataccgacattctaggatctgacaggactgagtcactgctagagcagtttgatacgttgttacaacgaatccttcgggagcccgggacgacagtgggcaacctgagacgtcagctagctcccgagtggcagcaattagcggcgattaacaggaagatctcgcccgaactgcattgcctacatgatattatccaggacttcagcgtcatccaaccaaattcagaggccgtctgcgcatgggatggctcactcacatataaagaactagtctcgttggcgtggagattggcaggccatatcaagtctttcgggtcccggtcggaacccggtgctgtcatcgggatctgtgtggaaagatcgaaatggtttcccgttgccatcctgggcgtcatgatgtcgggagccgccatggttttgttagaacccaatttccccgtgcctcgtttgcagcatatcttgcgagacgccggggcacggatgatgatatgctctctggtattccaagagaagtgtacgggcttggtcgatgatatgttgattctgactcccgatattgcgacccgagcggactacgatacttggactttaccatcggtgtctcatcaagatccaatgtatgttgcttttacatccgggtcaaccggtgccccgaagggtgttgtgatcgagcatggcatggtatattcgatgctcgaggcacataaggacataattggcgcatcaaatgggtcccgaggcttgcttttcgcctcgcccgcgtttgatatatgccttgccgagattgtacttatactcggtgccggaggctgcgtatgtgtgccttctgaagctcaacgcatgaacagcttggcgaaaacgatgacgaccatgcaggtcaacatggctatgctgactccttctgtggcacgcaccctctcgccagccgcggtcccttgtctccaaactctgattcttggaggagagccgccatcagcctccgatttggcgacatgggcttcacgggtccagctgcatcaatcctatgggccagccgagtgcactatgtacacaaccactacaccgccattgactcccagctcggacttgggcaacgtcggattttctccaaacgcgtcatgttggatcgttgacccggagaaccatgatgagcttcaaccggttggctccgtgggagaactattgatcggtgggccgattgttggaagaggctatatcaaccgaacccaggagtctgcagcggccttcattcgtgatcctgtctggagcgagaacttccccttcttacgaggagaccgactgtacaagactggagatctcgcttccttgaatgcagaggggtccttaactttggtcggccgaaaggatacacaggtcaagctcaatgggcaacggattgaggtgcacgagattgagcattgtgctgaaaagtaccaacatggtaccgcggtcattgcggaattaatcaaccctgccggcatccagagacctagacttgtcatgttcctctatgatcctgcgacggtagaaacaacggtgggcataaactctgcttgtcttgaacatcgggaactattgctcccaccgtcaacacgaaatcaagcttaccttgaaggtgtaagacatcatctcaatcaataccttccaccgtatatgataccatccctttttctttcgctgtcccgtctaccgcttagcccaagcggcaaggccgaccgcaagacactacgccagattgtttcgaaaatggatagagagacattggagatgtatatggataatccggtggcagagaaaagggaaccaacgacagagcaagagcgattcgtccgtgcaagtttcgccacagccctgtcattgaatgaggaggctgttggcatggacgataacttcttcgctctcggaggtgattctattactgccatgcgcgttctcactttgtgtcggagaaggaacatggccatctcgatgcaggattttctctcaaagaacactgtatccttgttttgcgcaaatgccattatgattcaggcccaaactgttgattccaagcgccagaaagccctgaattccgaagactccgttcgagggaaaaattatctcgtccagtttgagcatatcgaataccagctggacatggttcgatctcggttgaatttgttgaaatcggattccatcgaggaaatctacccctgctctgacgcccacagtggggtgttggagctctatacgtccaactacacaagcactgcaattttcgaaatttgttccaccgaatcagtgactgcgatacaggtgagcaacgcttggaatcaactagtgcatcgtcatgtcgccttgcgtacagttatgatgaaagaaccaaaggttcatgcagattaccttcatgtagtccttggcaagggaccagctcaaattcttgctcttccttgcagcaagaatgccctcacagagctgaaaaatctcgaaccagtccaattctggggcctgtcaccaccacaccggttaataatcggccaggacaattctggagcggtcttcataaggctggaaacgggctatgccttgatcgacgccttttctatgaccattctactagaagaactttctctcctcctccagggtcagcctttgccagagaatggagtctcgtaccgtcaatatctgtcccatttgcacagccagtcgtctgcaggaacgctgcaatactggacacagacgctttatggagtatacccttcccacctacccaaactccctgctaaacagtcccctctgcctgaaccgcgctcgcagagccgctgcctgtcattcgcgcaatcaaagcgtttagattccttctggcgttccaatcatctcaccatcaccaatgttttccagctggcatgggccttgactctcacccaatacaccaattcccgcgatgtgtgcttcggaaccatcacctcggggcgtgatacccctcaccttgaagtatggaatattgttgggtcatttttcaacattcttccgtgtcgaattgcaattgatcccacgcgtacggtattggatactctccgacagaaccaggaggatattcagcgtcgaaacgaccatcagtactgttccatgccagatatgatccgaaatgctggaataaggagcttagacaaggaccagcagctgttcaatacagttttgacagtgcagaacccattctcgacacgatcatctactgcaaaggatgggagcaacgagatcgatatcaaactcatcgatttggacgatgcaactgaggtgagggcctttggaactaggaccacgatcagaccgacaactgctgactcttttagtatgacctatgcgtagctattattccctcccattcccacttcaaggtcgaactacgctactggacgacgactgcatctgaggaatatgcttcggatattctagattgccttttcaaccagctggaacagattgtgcatcatgcgaccaagccattgagcgtcatcaccagtattggatgacaaccatatctcccaggacttccataatttctccttttgttatctaattttcggcattgttcttttgatatttccacactttggattcgcagatattcccgagtcccggtctacattattctcttagcacaatcaacaaaacaatataaagcatgaaatactggataaagttggttaggacttgtcgtccatgcaagtctacgagtgctcaagcatccgattccaaggcaatatcatatcctagaactggtctaaataatagaagagaaacaacaaaaagacaacacatagacagccaccaatatcgtggtcaatggatgaaacgccattcacacccttttccatacccgaacacggttctaagactggttccaactcaaattttgagggagccggtcgcggaagggaaaatatcgaaaagaaaaatccatgtacacaaaagaaaaggggaaaaaatgggaaaaagacaaataaaaggcagggggcacaggttgagggcatcggtccggacgagtaccgccgaaaatctcaaacaaaaatatcgttgccccatagtcgctatgtcatcacagtagaaaataaacggaaatcacatgtccatcagcagtccatctcctccgagacattatttggtggaattgcttcgatgcaagatctgtacattggttgcactggtaccactgccgaccgatcgtcgtcgcgggcgaatctcactgccgcttccgctccttcgccgtcggccggtgcttcgaatcgagcctcggcgtcgtgtctggagcaaacggacgttttcacgttagaattacgctggctgtacatgggcggacgcggtctcttagcaaaagacaagtacgagggcgatagggccagacaaaagggaagtagttcgcataggaatgcacgtatctgggcagcaaagcagcacggatcagagatgcactggacttaccgaattaggggtgccttcccggctgggccgatccttggaaatatcgggatcatcttgcaactttagggagttcaaccgcttttggctctcgtgagtcatggcctctacctcatcgatcgcctccggcacgtcaagagggggggctggtggtgggggaatgccgttcttccgatctttggcctgttgctcaatcacgtcccaccgttccgaacgaatcttttcacgttggtctgcgttgttctggtgctccgtgtaatcgtgagagcattcatcgaaaagttgcgggttgatctccatgaacatcttcatggcattgtaaaccatgctgtggattgttctgggaaaagagtcagttcatatttaagcagcacatgcagatcaaactcaccggttccagtgtcctttcgagttctcgtaaagcggcgcaaacataagcgggagaattgtctccacattgtcgctcacaagattacagaaatactcgttattccagaagtacaaagcacgttcagcaacctggaaatgaggactggcgacagacttggccaactgattgaacagaggctcctgtactttagcgaactcgcccggatccatcacctcgaagatatcttccacctcattcaggtacataacctccttagtgctattggtcttaggccagaagcgcagtaggccgagaacaacctagacatagtggttagtacccgaagtagattggagatgataatttagggcttacatcttcggtcaatgaggagtctttctccaaaaattgcactatgcagtaggccaattgcgggtggtacatgctgagactcttcaccttgtgcatgggtaggagcactctagtcaagaagagcttgtgttcctcctttagcggtaaagcgaacccgttgatgatggagcccagaatctcaagcaattcggcgattccgttatggcgttctgtctcgtacatgaactggaaaaagacgttgttgatggatcggcggatatatgaccgcaaattcaagaactttccatagatgcgatgcagagttgtcttgaggaagtcacgttcccggggatcttccgagtcaaagaggtccaacaactagatgtagtattagcttgtattaaacatggaaccgagcagcaggagacataccgaaagcacaaactgatggtcgatataacccttggcgatgttcgtgttgaaatcctggctttcgatgaatctcaaaaagaattcatataccacctggatatgaggccaagcgacttccaagaccggctcatcctcctctgggtcaaatgcctcaccttggggcgtcataggcgggggaataggacggaacaggttcttggcgaacatctctaccacgcgggggtacataggctctgtaatgaccgaccgattgttggcaacataatctaagagttcgtgcaacgccagcctcttgatctccttggacttcatatcagccgtagggtcgttgaaatcgaatatgatattgcactggtcgatcttttgcatgaacaaatcttggcgccggttgggaggcacttcgtggaatcccggcaacttctccaattctctctgacgctggtcggagatgtcgaatcgcgacgaatgttggcgtttgggggtccggataccttccgagatgtccttaggagttgtctgtaggcgatcgaagacatgggacttcctaggaggtgcaagatctccgggcattgtttcggcggcaccaggaggggggacatgctatgtaatccaatccattagaaaattcaaatagtgaaagctgagccaactggacttaccggtgggcttgggctaatgatgacgttgggggccgctggttggccttgcctgttcggagttcctggtccattgcttacaggctgtccggcagtgcccggttggggtatatagtgttgaaccggggtgccggggtgaggtgcgcccgcagaaggggttccggctggggaggcattgtctggagatttgtttcgcgagtcattgagagaggttgtagaggatgtgggtgtcccttgactaggggaagtaggctgctgtgcgctagaaattccgagggattggttctgtggagtggagttggagtctttctttttcgaggacttattgtctttcgcccgcgacaactggtcgtgctaaaagcaagacacaaaatgttagcttatttgcgaggtaaatgaggtagcaccagctgcaaggtggagaagaggatagattgccagaagtgatagtgcggtgaggtgcacttggacaggatacgcgggtaactcacgactctctgtctgaaacccttcattttgatgattatgtagatggccacatgtactcggctatgtttcttggtgccagtgcagccaggcggcgcactctagccggaatatatcgaaggagccaactgaaatagccgcccaagatagccacgagggggtggggggacaagtgtttgaattgacctaataggagaatctcataagcggtccgagtcacacagcaggtaagacggttattgtgaagggagatagttctgaaattctgatataaagccctgggaatgcgtggaggagaagctggggttcaatggcaacatcatcaggcgctccaaacaatgtgcagtcgcagcacgcgcacggagcaagacgatgataggaagaaagggccaatgcaggcagtgggagacgagagtccgatcaaacgtacctctgtagatctgagttggacaattgacggatcgagtggcaaatttctcggcgagagcagttgttataggacaagcttggtcggcgctggaggatctccgtgtcgcttagtggcaggctgggagcggggggtttggtagcaccagacgggcactcaggtcgcagcccactgcgaaagcacgaaaatcacggtctgactagcaagagacaaagtggacgatgtacaagagaccaagtaaagatgatgtcgttgggttgtggagaggggagagggaagtggattgttgttgaggtgtagggaaaggcgggctagttctcctggctgcgatggtgatgggggggaccacgcccaagtactatgtggtggactttacgttctggctaagtggcctggatctattcgccctttaatttgagacaatgaatttactcgacagctatattattccccccttctcttctcctaacatcactttggtatgctttttcccgcttgtttcaaattatgcttatgtcatggctcacgtgacctataaaggaactcgaatttcaggcacagacagcaacgccaccaacaccggacacccaggtaactgactctacctattcacggagtagctaactgactagttagttagtcaattagtgattgaatgtgtttgcctattatttaagtctgaagaagtcagatgtagttcacatgtgatatatcctttcgagtcaagcaaagcaggtctgtgctctacgacaacaatagtctacaacaacaatagctgtgtgaggcataaccttaggctacagaggaaatttctacttgaaaggtctcgatatttccgaaaatcaatcttatggcatatcataaggtatagcactgctgaatgttgtcgcgcaaaataattcggagaagtggacatatatatctttccaaaggactacattagtatttctctccttcacatcaccacaaccaacgcggataaacacctatcagccttccttacttgcaatcctcgccatacttcccgatctctgtttctttaccaactaaacccttacttgaatactgaccgttacttgatcactggctcttactttccttcttcatgctcaacggtctttgacattacctccaatactcttagcttccaccatggcggacttcatcatgcttcggatcgcatgtcaggatatagacgcgctatcttcggacagagagaccaagcccctacgcgagtcatgtcacgaaaccatttatctggatactctttagtgtctgcaatgttttcgcttccaagtcagcaacaattggaatgatgatagttaccccttttatgtgatgtgtcgaattgaagccggctcgccacaaaagtgttgcgattgcaaagaagccggctacaaatgtgactggggaagctttgactcttgctaaacctgtgcttgaaatagatgcttacaccgattgggatcttctacagatcccgcagggtatccggggccatgtctttgaactgatggccttgatcgaattcgtgaaaagatactggaccgacaacggtggtatcggtggtgtaccgatgcatgtacggatccggtgtgaaggtgtccctgaggaacatttccccgcgttaattgagctctttactgcctttgatgacctagtcgagacccatataaaggctcatatgctgacaggcaatggctctaacgtgagttttgttcaacgtgttctacattcgtgaggatattaatcctttacggtgggctttcgtgattgtatcaccggggttatattcacgatttgctttttttttccgccagcttcttcattgtgaggtttcctgttaatagcgtggtgaggcggctattgaccaggacctatttgatgttttcctgcctggttctgtggttgtttcagtgcccttacaaagcatctttttccagctttttgcatcatttgaaattctagactctactaagcgcaagtgatcctcatatttactaggcgaagacataaggtttaccaaacaaggtcgacaggataggagatagcaacatcggaggtcaaaatgcacctcataactaacagcgtctacattagtaccgcaaagttacgagaaaatatagaacgcaaagagaagagacactagacttggagccaaaaatgtcccaaaagtttctgatccgtttatcattgaccactccctagaagtatagttaccagaaagacagaaattgctcgaaccaactaattacatttgatattcaccgagtttcgttcaaatccatacaacctcattgagtcaacattagaaccagcgatcgtacggccatgagggctctacccaagctcaggcgtgtgcttgacacagcactatttttctcacttgtgctactaacaccggcagctgtattttcctcagcatatgtgtagtaaagactagcggctgtctgcgtgcctagactatcagcagcagtggtagtgggcaaactggccgccgagctcgacgaccattcttttgcgaaaggatagaatcctgtcgtttgagggttggcactacagtagcgctcgagacccccatcacgtaactctgcgggaaccagtggtagcctgtgtaaatgttagtttttcaatcaaaccagagaaaagcatagcgccaatatattctgtggaaaagacccaccctcaatgcctccatgttttctgaaacactcctgacaaccggccgctgagtcaaagaagggatatacgtcacaatagcattgctgctggacatcccaatggtccgaatacggcacaaggcctgaaaatgtgccgttcatgttccagaaataacaattagaatttaattcccgcttgtcgttgacatggagcctcgtcgatcagatatgtgggcttgggaccctaggtcgcgatagtagagttaggtaagtactctacgaaataacgtaatcggtaagcgagccgccactgtaagcgagccgccaccctatccaaaacgcgtccatgaattagcacctagttagttcaaccacccaccatgccaccaattcgctctcaatccgctagcaaattagaacagcaagagggtaggcttttattagctatccaggctcttcaaaacggagatattagctctattactcttgctgcgcgtacttttagtatcccgcgtacaactttacgcgaccgcctctctggctgttctcaacgaagtactacacgcgctaactcgtctaaattaactgcaattgaagaggaatctcttcaaaaatggattctctctatggattctcgtggatcagctccccggccctctatggtacaagaaatggcgaatcttcttcttgaaaagcgcggaactaccccagtcattttggttggcgaaaaatgggtttacaatttcataaaacgacgccctcttctttcctctcggttcttaagacgttataattatgagcgcgcgaagtgtgaagacccaaaaatcattggagaatggtttaatcttgttcaaaaaactattattcaatttgggattgacccagacgatatttataacttcgataagaccggatttgcaatgggattaattgtaacggtaaaggttataatcccggttctttcggttggcgaaaaatgggtttacaattttataaaacgatacccttctctttcctcgcggttcttaagacgttataattacgagcgcgcgaaatgtgaagacccaaaaatcattggagaatggtttaatcttatttaaaaaaccatcatttaatttggaattaacctagacgatatttataacttcgataagaccggatttgtaataggattaactgtaacggtaaaggttataataagaagtgaatactacggtcggagattacttttataacccggaaatcgcgagtgggtgactgcaattaaatgtataaactcggcaggatgggccctccctctgtgtattatttttaaaggtaaggtcttccttaaatcatggtttaaaggccttcctagcgactagcgctttgaagttagtctaaatgggtagatatcagatgaaataggccttcgttggctacaaaagctctttattctaactacttcttcttgtataaagggagtatatcgacttttggtactcgatggccatggaagccatttaaccctaaaattcgatgagatttgtgagaaaaataagattataccaatttgtatgccactgcatttatcttaccttttacaacccctcgatatcggttgttttgcggtggtaaaacggtcgtacggccggttggttgagataaaaatgcggactgggattaaccatattgataaacttgagttcttagaagcatatccctctgtacgaattgaagctttaaaattggagacaattaaaaatagcttcttagcagctggtttaatacctttttcacctaatcgggtactttcaaaactcaatattcatcttcgaataccaaccccccctcccagcaggggtagcgattcaagccggaattttaccccaaaaaccccttttaatggcaaagatctacgtcgataggcttcgtcaatcaaagctttacttcgtacccaatctcgaagcctaataagcccttctaagtgtgcattagatcaacttgtcaaaggctgctagattgcaatgcatagtgctattctactagcaaaagaaaacaaggatttacgggatgaaaatgagaataagaagcaaaagcgggctagatctagacggcagatacctgccgaagaaggcctctcagttcaagaagcttctgaaataattgctagactggtggaagcatcagaaacacccctatatcccccggacggaagcactcaatcagggttggaaccacgaccacgggctgcaccaaggtgtagtgggtgtggaaagatagggcataagatcaataggtgttcagataaatgatcctttttagtttaattaatttaatggcgttttggttgaaatatattccttagaaaactatactcttgggtagggtggcggctcgcttacagtggcggctcgcttaccgattacgttagttagttacctattttaccatcctccttataatgaccgtcgctatattactttccctaattaacattagttcggataccactatagaggatatagtatctatagtagtttcgggcatatacccctcttacttaatagtttctattttccttttttaccgccgcgtccgtggtgatatctcccgatataacgataacgaggatgatattattaacgtgcccggtataactaaagcttatctagggatccttccactacctcggtatcattagtaccatgattaacaggtatacgatcatctatattagcattgtcatctttttcagcttctggccaagtataatagacccaatagtagagacaatgaactagagcattgtggcaatcgggggcagcgtcttccttgccattatatactacgttgtgcgcgcccggcacatctacaagggtcctattgtggaagtctccttatagagagttgttgcatagactttgagggagaggctaatagttcatttttagcttttcataacgggtaattaaagtcaaggtggtaaacataagacattagtaactttgcactccaattgagctattctcaaaagacaccaacaaccctttcccgtcgcctttgtgtggaacgggtgatacgcctgtaagttcagacttcgattcatggttttcagtacgaagtgacgcaggtatccttgcttgaggccaattgggtcggtctactctccatgttcttctatatacagccggatacaatgttggacctggactcaacgcacaaggtcaaacaacaaaaaaagacgcgttcaggacgctggtaactgatcaatacaaagtaatatacagactgttaaccccttccggtgaagttaacaagagcacctaaaacctcactcaaataacaccacagcatgagtggagtccgacatatgcaaatggcggtgcgttttcaactttttcaagtcgtgttcaatcgtaatccatcccctggatacctcttccctttcctgggccgtggattctcgcatctcttcgagtccttgcgaaattcgacccattacaatcatgcatttttgatgtctgcctagcgagtcattgatctctctgactatcccgcttaagggatatcctgctagaccccataaccctgattaagattagcttgtaaacaataagatcacagaaacattgcctgcatgttccacatacctgctgtcggcttgagaaacaacccaccgattcctttcccgacacctttgagaagccccttagcacctccgtgcttaagaccatgatgcggctgtgttcctaggcccttaataccgaagtaaaatccatctcggaactcctgtacatatgttagaatatctggccctagactggcgctggtatggctgttactacctttcctgccgccctgaacccgcttcgaagactgaccacctgggggatgtcggttactgtcgtgtcgtgatataatttgggtgcgttgtggaaacctctggccatgctcagtgtcaaatcggtcggtaccactatgattatcttcaatattttcttggacatttgacttccgtgtaacgcagcttcgtgtaaaatagtagatttaggtggatttgtcggtgtcatcgagctgctcattgtcttggccttttcgagctggatattccttttgcgttctgtgctccgaattcgatcaatgctgttgatatcggtttcattgtccgcatcggtagtatcttcctgtgcactctccccttctaggatttcaccatctcgctgttcctcattctcaatctgcaattgctcgttctcattttgaatatgtgtttcagtcccatcattattctctggagataaatgatccggtgaagaaagtactgcctgacatgctgcgtggcgatcaaaatgttcatggggttggcgtattgagcgagcagcagaaacaatatcatgcacaatctctctgggcgcatcgacaagcccagtcacgaagctcgtaatgactccaaagagcacctgagcactagcagtaagtgggtcggcagggtccagcaatgtatcatactcaattggacggtaactggaggcgaatcagcaagaaactctcacagctgtggtgactttgtggaacaagacttacagcacgagcatatctgggctgatcttccctgatctcactagaaccgttgctgcaaaggcactgaggttgattctggtatgtttgagatgccaagccgccggatgattcgggactatagagcatctgtatgactgggggtcaagatttcgatgaaagctattcaccccatggcgcacgccagactcttcctgcattttcaacgcgatcgtctgtgctctctctagagtactcggctctagcgctttcgcgattgcgcttgagagattctgcacgttcaaaattttatgtggtattggtgctggcccagctccagcacgcgcaacgatgtttccccagaattgctggtctccaaagaaagggacaattattgtcggtcgacctagcgcgagccctgccgctgtggtgccagcaccaccatggtggataacacatgaaacctgcccaaacagccaatcgtgagggcagtttccaatcatcagaatattgtccggcacttcgtctgcccccaaattcccccagccttttgagataagagcccgctgtccggaatttttgactgcttcaaatatggtttttgtcagtttgttcgcattatcaactacaatcgagccaaaaccaatgtatattggttttggtcctgcttcgagaaatgcagctatttccgttggtggtgtgtagctggtctctgagaggaggaagccaaagccgcatacatcgatgttatcagcccaatcagggggcttaggtagtaatgaaggggacctgtttcaaatattagaatacttttgccaaccaggaatatgttactaaccacatatacgtatgtggcacatgtagtcggtgtagtatgcttggggcagtcattgtatccaggggttggagtgccaaggtatttttgcgaagtgtgttcagaatatctcctaatccttcccataccatcatatcgacgatattgtaggacacgaaatttgcgatagttggcttgcagttccggcggtgaacattcgctaacgggtggggaaaagactgggttggtgaccagggcatcctattattgattaggtgttcagtatatgaaaggcgcatagagattactatataagagggtcaactcacgtgaatatgatatggagagggatacccagtcgttgggcgcaatggatatgggcaaggctaggagggtttgctataatagcatccgcgacaaagggccgctgtcggtaatccactgtcttactgaatgggtcttccttaatctggtgaaggtaagtcccatcacccttttcaaagcaagatttccaacatccattgaagatttccttcatctcacggcgacgcctctggatatctccgctgcgtattgccttgaagcccggtaaaaggcccggatttttgaccatataagccatcagctcctctgggtctcctccgatattgaagaactctagaccggtatcgagaacaaactgccgaaaagctaaatgtgtggccaatctgactcgatgaccgtgtgctttcagttctttccctaatgccacaaatggttgaatatcgcctcgagaaccaataacttggatgacgaggtttaagtgcaatgggaaatgctcatcattcgtgtagggccgttccgcgctgacagcgcattcggaatctcgctcagaatgtatatccgcgcgttggatgtgctttaatagccctccgaggtgcggtttatgctgatcgatatggatatccactcggccgtcacctacaacaaaatgtgatcccgttagtgcaaagtcagtgattctcgccggaacattttttacctagaatacgggcgttcaacccatcctcaaagaattgcactccatcggggtcatctgatgctcgcttagtatcttcactcgcccaatcacccgagcgattgatgtccattctctcgaatgatatttctgcaggatttggtgctagtacagttgccatgatcgacaggggtatggcgcgtgggatggttagaggaataattgtgagattgacgatcaggaaaagcgatggtcaagacgaggcaagacaaaaagtccaacacgtggcgaggtctccttggactctcgcactctcgccttctcgtaactctgacaaatccaagttcaaaatgccattcatgttatgttttggtggttaatgacgtctgtagactgcttacgcccaaggtatgtgaaactttagctttatgtgaacgatcgctgggtctagatcaccttgctcgtcagtcaatgcctaggtcattctcggtcggattatatttactggtaacaagtagaccgcggcacggtttacggcagtctgcagccgccagtgcgccagtagatattttgcccaactcctctgagccaggggagaggtatcctagaagcgtttactcgattcagtggagatggaatctgataaaaaaaaaaccaccagaatctgatggaaattactaggttgctgatacacgaaaatggatgcttcccttttttatgaatgttccttcctaataatatccccccgctcgaaagcggtcgcccggaggcctccttctccttctgccagcattatccgtatttcccatatcccctcccacaacgataatgaaacaatatcgttatcgtactatatgccgcagcctaggctcaatatgacggctgattttgtttccgctgagtatcttccactatatgcgattgcatagagccaggaggtgagattgcagaaactcttgaacggcgatagaaggggactgaggaggcgttggatgactcgtgcagtttgactgggatctagggatgaagcccgaatcatccaaccagggctttctcttgaatttacagcgaacgaggacggaactatattcaaagtcttcggccaagggcatctgccgctcgcgccagaatccggagctacgttgcagcggagccagatttggcccccgtttccggctgggatgaagacactaccatcaactgcctatgaaggtttagtgtgtaaaacaatgttcccctcctcttcttccgcaagcttcgtatacgcccgtcttacatagaacacaaaaggctgctttgatgctgtaaatcatagattggaagatagtccaaatacctaaaacttcaatatgacatcgttaaaggacaatgtcaattatgtaaccatcccgttaaactctggaaagggcctcagaagtaacaaaaagctaactcaatgatcaatcaagaagaacgtatgaaaaacaggtaagacagtaagtgccaatatttcgacttgcagagaaataaatcgggatattgatgccataagacctaatcagctccagaaaggctcctgcaaaatcttgaccatggcaatgttttttctcttgtcttcttccttcttccgatttaacttgttcagcctgtacggggtgatagtggcgggaaattcctaaatcatagattggaagatagtccaaatacctaaaacttcaatatgacatcgttaaaggacaatgtcaattatgtaaccatcccgttaaactctggaaagggcctcagaagtaacaaaaagctaactcaatgatcaatcaagaagaacgtatgaaaaacaggtaagacagtaagtgccaatatttcgacttgcagagaaataaatcgggatattgatgccataagacctaatcagctccaaaaaggctcctgcaaaatcttgaccatggcaatgttttttctcttgtcttcttccttcttccgatttaacttgttcagcctgtacggggtgatagtggcggtaacttcacaccctaggtgagcatcctatgcaccgagggcgtgagtcccactcatcctgggtgagcttacttattctaggtcgcgttagcatattaaatttatatagagttttctaattacggatttctatatcgattctaatataagttgtggcacctatatacatctatcacgggtaggaggttacttattgaacgaccttaagaagatttgttaaagcttaatatacttcgagccggcttttaaagccatttttctagagggaagactcggtaatgaatacggacgaagcaattggctagataatagaattttgtacaccaaaatttatcccgaaagtagagcattaccgttattaggcgagtttcgactataagggagctagtactactcttgaaccctaattataataagatgtttagttagaactttctctatctgctaaacaatccctataaaataatcgagttccgacgcggagcggcgagtactttagtgtaagacgtctttatttatatagagattgcgatgtcctttctcgaagcctaggtccgactaggagatgtggaacgtcttaagagtgtgcccgccactattggcggtctttagtgattcatccaagctgcgaagctgccagacggcattactagattatttgactcccggtatcttaagttattcttcgtagggaagaatcaaagtgcattccgtgagccaaaaccgcttggtaatctttcaccaatttttcacatccaggctaataaggtttcatcgctgcttcaaggggaaaggcatattgaatgattgattgattagatgtgtgtggcttgagtacggctgagcggacggggagccctattttccacaccctatggtcgtatgtgttaggtcagtcacgtgttagatatcattatagaatgaaatcaatttagggaattggcgagaagaaatttaagcaggtggggtccacgattacggagtactctaaaccattatgtgatttaataatgaataggattgaggaccaaccgctctctttttagctgcaagaatgcacgaccaagtagtataagtgggttcatgcggggcggccacaattatacgactcactcagctccaatcccagtcgactagggtacaggcccaagctccaaatcttcataaccgctagtgttcctccgtggctccctagcgacaacatatgatgtcccaaagggtaccccaaatgccgcccatgaacagcgcggtgcccaagcccatccgctgtggtctaggaattccccagcatgagacggaacgtgataccatcgaatcgcaaaccaggcgaagaaaataccaataagacttccgcccataatgtcccagccagcgtgcatataatctgcatacctagtcgcgcagatgtagagggctacgcctataggagatagaacgagtagaagaaggtataggggcggagcggttgcggacgagcgagtggggatggggtcgtgtgtagtctgcgcgaggctgttatttcgatcccgctgtcctatttggggagtgagacgaaatggcataggaaagcgaacggcaaacttgatgctgagccagagggtgaggtagagaagcccggcccacgagaacgatgagtggccggatggaaaggcggcgaacccatccttcacaatactagcatcggtgtttcgacatatgctgctggtgaccatgataggggctgatgcctgcttgagaccaaggcccccaacaatgtagtcggcaacgtttgagagatcagggtcgcagcgggcaaggaagtccggtcggggcttccctacgacatcctttaggccagatgtcacgaagaaggcacctgctaaactaaggccaagtcctagccatcctgcatgccattcccatagtcgacgtctccacacgctccctccgtcaccgtggctcgatgttttgatggccgatgaagggatcaggagagatagtgctaggattgtgatggcaggcgcaccgcaagcgacgattgcaacgacggtgatgctgacagtatcggaaaggaggggatatgatatttggggatcttcgagagagaacgcatggcgataacccgtgatcttgtacaacacaccacctacagcggcaacaaggcttcatatttcaattagtaagggacggaggagtcctatgggaataatcgaacgaacatgatgatggcccaatcgagcacgtaagaaaatatcaactgaatagaggatctctctcctgaaaggagcctactatccagatttcctggattatatgccatgggtagagatttgagcgggtagtaaaagtcacgagagcaaaaggcgaggtaggaaaagaacacgatatgaattagcttgaaaaactattggctggattactggcgcctttgacatttacaaatagacctgctagtttcagatccaatctaggccgcggtttgcggaaataaagaaagccgagggcattcctttgggagcgtacagcccaggccccacttagggcatacaggtccatttgctatggaccttctaataccgggaacattaccatatatcgtagatactgtagaagcacgtgcgcagtttccggtccataaaagttggtaactggactgacttggacgacaggatttatactatttacatgcatcatgctctgtccgttgatccaagtctgtttttgttactttccattccacggagttgcctttcaaacggcatgcaatgagttataatgcaaccgaattcttctttaggggagctaggtcactagttagtagcgtacccgatgatgctaacaagaaaataaccaaataagcctggtttcataccttccgtacccgccactggggacgaattggtcactctgaatggctttgcaaccctccattctgagttgcctccgaaggcatcaaaatggcaatcctgctgccactttgaattgagtttctggataccgggttgaaaggccgctgtcaatccagccattcacttgtctgtgcgcacggtactcttcttccaggtcgtggatatgtactttcaatagatagcgcggaaatacaattactaatacgataaccatggcaatgcggattctatagttcatggtcatgatagaagcggttggtgatgtgaaggctttcgggtacactttcattgataaatatgtcgacagataaaaacgaacgatatatggtggtggtgttgcccaataggaatccagacaataccagggctttatccagataactcaatgttgccaacttccgacttccaatccaaatttacaacaattcattcttggcacgaaagctgggtttgtaccgtacattgtatgtgttccgtcaccggtcaagcaattccacaaaagcaggtagagataaaagatatcggatttaatcttgcagcgaatataggcagaaaataacaaacctctaatcaaatcccatagggccaatgggagggttaaatgaaggcacgtgatactgactgtcgatctatagacgagggaataggcgtggcagtttctttgggaataaccttatcatcgctatcattccctgcaaagcactgtacacatgaccatattgtcgagagatcccactatgaggcttggcggtaaacaaaaagaataaaagaagaacatagtgcatggaccatgtctccacaccgcactggcccaaatgggttaagggggttaattttaattgatgaccctgcaggtaaccccaaatagaacagaagaatgtcactcgcgccacgctattcgtcacaggtaataatatccatctgcctggcgctctcggcaactctcgccccgtcagggttcagcctaggcaaacccagaatctccacctagtagccgataaaccctttgacagaaaatcgtggtacggcgagtgtattggtcacattcaatggcagtaaaatctctaactaaaatcaacagggtccgaaattgacaatttgcccaggtggtacgacacgattagtaagcaaaatgcagataactacaacatacaagtcacaagcggtctgtaaaaagacaggtaaagtaaggtaccaatcgtgattcttgacaacctggtttctatggcgccggtatggagtcaaacaattctgctgcctaaccaagtgccgtgggagatctgtattggttagaagagggcgcatttggattgccagaaacggcacattgcaagtgagcacggcccaattgtttggtttatcttttttatctattaccaacttgctctgagacacggatcggatttctatcatggatatgcttctggtggcacgagctggtattgtttgttgttaagaagaagcctgcagctgatacgtaacccgccagacggaggtgagaaccgtatcgcatgctggctttgcgacaaggggtgagcgtggaacatcagcgaggaagaagcgacacgatctcaatgaagatttagagagtctgagggggccgtgaaaatggggagacgcgtacttgtctagatcagactcctgaggcagtaggcgaggtatcccagtctgttgaacgtcttatcttgggatcagagcactggcgcatgggctagcgaagcaggctagctttttgtttttcgttgcttgttccagtcatattccatactgcggccgatttttcggtttgatcccgcttgcttcggggtcaatgaaacgttatatattgcacaggcgagcggcgcagtccgaaacacgtaggaaatgcaatataaaccgaaaagcaataagctagcaggaaaactctgtatagcctaccgttgttgaaatatcaagttgtgatttatctcatttactagtgtttcggactctgccactcgcatgtgaaatacggtagattatgcgtctgggtgttctctgaaagttcttcctagcccctttctgtattccaagtgtagatcaacgatctgcatgtactgagtagactggacggagctagaccagtacagtatcagccgtttccaaaattcccagacactacggagtacttctttcccaagcacggaataaatccgcaccttatccgagaaaccatcgatactccatcgatagcaaagtttcgtacgggaaatttaggtgcctagcaccgcttgggtgggtgatgcagggacacagacccaaaagaagaacaagcagcgactaaaaaagcttggcctagtagccaatcagctaataatcttcgcggtggcttttcatcctgcttcccacttttcgagtgttctgatagtccacaatcaattcgggcgtcgtaagctcttcatctaccagcaatggacttcggcgaggactcggcaacacggcctctggacggattaactctcccttgtgtggatcgcggccaggtgaagccggacttcggttcccatagatctattgttgcagtgaattttcatgatgtggtactttttttcctatctctcagcggtacttgagaatctgcccctgttggtgggagcaaggatctttttctagcgctattttctggttatcagtcctttccctcattaggctttgcgttgccaaatgtgccccgacttctcaagctcaagagctctattcaaaatgtttcaattattcacaaggtttaagcatcctaacactgagagagtcaaaaaaggcgttgcagcgccgccactccactacgccaaagtctgtcgacacggaagatgctttcgaagcagagttggcaggcaatgtttcgttgagtgttcttggagggactcagtttgaggcagagtcgaaatatcttttcaacaaccaggaggtcgttcacgccatcatcttacccaattataaagaaaattttgataccttatggaccacgctctatgttctagccagtcaccctagagctgccagtcagtatgaggtgagttccgttctagtcgttcatttcttcatgaaggagctatattgaccgatgattgttccaaactagatataccttgcaatggaacaaaaggagctcgaggcccctgcaaaagcggtcagtctagtttcagcttttgaaaccagattttcttacattgaagccacgttccatccgtctggagtaccaggcgagatagccgggaagagttccaacgtcgcatacgccgctcaacgtatcatcaatccacacagaagagacagcagggaggacttgaccagtaaattaatcactgttattgatggtgtgtcgagatatatccatctcctattaagacttcaccatgctgataacccttacgggtagccgatacccatctattgcaggattacttcaatgggtccaacgacttcagttcgacgatattgccagccccgaactatccttctatacctgtcccatcatcttcgatcgaaactcatccgaaacaccgattctagtccgctgtgcagatatgatgtgggcattcgcaggtgtctcagccatgtaccctagatccccgatctccattcccacctccgtatatactcttcctctcagcatggcagaacgagttgggggatggaacagtgatggtggggcaattggtggagatatgcatatgcttctcaagtgctactttgccatggatggcaacatcaccacacgtgttgtcgcaagcccagcgagccaatgtaatatatccagcaatgagcatcgtggctggcgccggaacatggatattttggcagctcgctatcgtcaagctttgcgccatatgtggggtgcactggatacgggatttttcattcggcagagtgctgccaacctgtcgcgtcccagctggcaaatccttttcagcgggacgcaatgggcccttgcacatcttctcttcgaagcgcacttccttccttgtcatttgataatcacgttggctatgtcatctatttatttcgctttcatttcctcggagtctatgcatccggatttggagtgggcatttcaattcaccggcgttctggaggtttgttctttcattatgatgaacatctgcatgatagtctatggaaattggcataatctctgcgtcaatacctgtcttacggacatgatggatgccgttgtccctgatgcgggcttttcattccgaaatgagtggaatggcggtactcttctcgagcgtatcctttttcccgtggcgggaacattgttcgggcccgtcccggccatccaagctgtcttttctcatttctggactgatagattggtatataaagtaagccgaaagccaagcttccgtccaagctctgtctaaaagatatatcttctcttgcaggctgagacttgggtttccatgtggcgatgagaaatggtcttcagttcactccagttctggcttttggtctggtattacactcattttaagatagtgtgcacaggaattttatagattttctttctgtatctctactgattgaatacaatttcttgggttgctgctcaagtcagtagatagcctcgtctcttcctctcttcttctcctatctgtccgcgatcatcgtacagaatatcacccacagtttctctttgcatctaaattctgtagatctagacatgtgcactttttcatgcccgtgattgctcccctgggtctttggcgctgattgaactgattcatctaaccttccaatgagcaggtcttgttttcaatacgaaatcgactgtggcaagtaagcttggtggggaagatgatgatattatgaaccccttgttgggggtgctaactagctaactatgactaagctgtgacannnnnnnnnnnnnnnnnnnnnnnnnnnnnnnnnnnnnnnnnnnnnnnnnnnnnnnnnnnnnnnnnnnnnnnnnnnnnnnnnnnnnnnnnnnnnnnnnnnnnnnnnnnnnnnnnnnnnnnnnnnnnnnnnnnnnnnnnnnnnnnnnnnnnnnnnnnnnnnnnnnnnnnnnnnnnnnnnnnnnnnnnnnnnnnnnnnnnnnnnnnnnnnnnnnnnnnnnnnnnnnnnnnnnnnnnnnnnnnnnnnnnnnnnnnnnnnnnnnnnnnnnnnnnnnnnnnnnnnnnnnnnnnnnnnnnnnnnnnnnnnnnnnnnnnnnnnnnnnnnnnnnnnnnnnnnnnnnnnnnnnnnnnnnnnnnnnnnnnnnnnnnnnnnnnnnnnnnnnnnnnnnnnnnnnnnnnnnnnnnnnnnnnnnnnnnnnnnnnnnnnnnnnnnnnnnnnnnnnnnnnnnnnnnnnnnnnnnnnnnnnnnnnnnnnnnnnnnnnnnnnnnnnnnnnnnnnnnnnnnnnnnnnnnnnnnnnnnnnnnnnnnnnnnnnnnnnnnnnnnnnnnnnnnnnnnnnnnnnnnnnnnnnnnnnnnnnnnnnnnnnnnnnnnnnaacgcccggggtcgtacggtggcccctcggtggccgcttcgagaggagcttcgcagtggttgccacgttcttcatcgcctagcagtaacgggctccctggttgggcttggtcgtcaggagcagcgctttgttgaagttggcaggggcggtggaacaggttttcccagcgtctgatggctcggcgctgaatatccgggaaactgctgagcgtgttcgagattgtcataagggtgccagcggcaacggcttcggtcttctcggtcagagcggcctcttggagttacagctggcgatatctagccatgtgttcgcgtaacctttttaaatcctcgatctctggctgtacccggtccatatgctccattatgcctttgtagggaaggatgaaatcgcggaggatcttttcctcggtatcagctcggcacagttggctttgcacggctggcaattggctctgaggttcaggaatgtccggtgaagagaacggagcggaagagctgacgctgatcgcgtcgccaggttggaaacccgagagagatcctctcggaagaaaaaaaactctggatgaaaccaggacgtgctaccataaatgtggcaagtaagcttggtggggaagatgatgatattatgaaccccttgttgggggtgctaactagctaactatgactaagctgtgacaatatgccgggtctcaaaaaatctcggcctccggctgagaaaaaaaggaaatttcaataaaaaataagaataaaaaatgataagaaaacgaaaaacgccgtcagttgtcgcaggcccggggcggagtatagatgtccgagggcgtgaattcacgcccggggtcgtacggtggcccctcggtggccacttcgagaggagcttcgcagtggttgccacgttctttatcgcctagtagtaacgggctctctagttgggcttggttgttaggagcagcgctttattaaagttggcaggggcggtggaacaggttttcccagcgtctgatggctcggcgctgaatatccgggaaactgctgagcgtgttcgagattgtcataagggtgccagcggcaacggcttcggtcttctcggtcagagcggcctcttggagttacagctggcgatatctagccatgtgttcgcgtaacctttttaaatcctcgatctctggctgtacccggtccatatgctccattatgcctttatagggaaggatgaaatcgcggaggatcttttcctcggtatcagctcggcacagttggctttgcacggctggcaattggctctgaggtttaggaatgtccggtaaagagaacggagcggaagagctgacgctgatcgtgtcgccaggttggtcctgcgtggtgggctggtattcttgctgagtaccgtgactagactaagttggacgatttgtattctggtatgagcgttgaactgggtctatgatctttatctttttcaggtccatttgggagaaagtaaaagacagtacttcagccgagcataaaggagaccacgtggagaattcccagaaaaaaccataggagggtcttagtccttgtaggagtatagcgacgtggtagtgattgtctgagccgatgtccagtatctttgagttcgtttcagctttctagagtatggtatactgaccgtggtggttatgtaattggtataccacagaacgggggtacggaaatttggcttgttctttagcgtggtgggcttggaataccgctgctgggtcagtaactgtatcctctgcgaaaggataacctaggacgataggtccgattgtgaaaactgggttttcgattttaagctttaaatctgccttcgggactattaggtagctgtattttgcggttgcacgaaggctaacgaatgtatagtaacgtttccagattggcgtgtatgggagaccatagaagtcgatttatgggccggggtcctgtggtatcctactagcatgtggtttaccgttggtgtcccagacggtacggaactcggcgcgctttttctgagatagttcctttatcgctgtataaataagctcgttgcttagtagaacgttgcggtcgttaggtagtactagccttccttttgggtcgcgcttgtatctcatatataagggcaaccgagcgatatcttgtggagatagtctactgcctgtgataactgggacccagtcactggtctagattggcctatccagttctagtttagtacgagcggtatcacgagattgtgtcatgtaggaatcgtcgaatgcgtatcccggaaggcaaagtatatcagtcgctccctgtgatggaccaaggtacgggagtgcctttctttttggtataatgagtctggtgtgtaagaaagagaatggttaatgtgaaaaaagaagtaatggaggtaggaaaaatggaacaggtacgttaagcagcaagtaatagttgaatgagagttagaaactcaaattggagtaaaagtaggagttggaagtaagagtcaagtgatgtgaggtagtgagaatggatagtaataaaagtaaaaggaaagtaaaaataaagcgaggaaaatgtggtacttaggagctcgctgggggtacgccctgacgctcctcgaagtctttgatagccttgttacatccgatgcagtcctcttcccgcacctaatagtcgtccctagctgattggcctttctagcggattagatacttagtgatttgatgcctagtactgttgtgacggggtcgaccaggcgcgttgacgacgcgcttggtaagaatgcggtcgacctcgtagacgatatctttggggaaacgctcgtctgtagtcgggtggtgttcgtcatctggttggcgctcccaggggtcgtcaccgtctggggcgggttctaggtatatgatactgatgactgggtggattcttgactcagttggaatatttaaacgataagcaagcttcctgacgcgttcgagtacttcgaaacgcccgatgtaacgctgtcgtagtcgccttggtaaaacttggttcaacggtgtgtcgtatccgtgtcccagcttaagatagactttgtcaccgatattgaaaaaaatctgcctgtgatagcggttgtattggcgttttatacgcatggcagcctaagcggcagaatgctcggcatctgtacgcgcggcgatgtcgggagctgtggcttggtgtaaaagcgactaagggtggcgtagttcgatactgtataagagtttgtaaggtgagtgacctgtcgttatactgactgagctgtttagcgcagcttggagggcgggtaataggtttggctaatcttcgtcggggtgagtggcgattgtgtgccgtatagtaacttcggctgtctggttagtatgttctgactgactgtcagtttgtgggtgataggtggtagtaaaaaacaacttggtgtagatgaggtcgaaaagtgctttccagaggccctgtgtgaacttagggttgcgatcgctgataatcactgtaggaatcccctaattggctgtctaccagaaagagagagtacccagcgcctaatcttcactgtcccagtctatacagccaggtattattcccatcaacttggtgaacttgtcggtcatagtcatggctgtgttatatctgtcggtcgaaatgggtatcgcgacgattagatctaaagtaatagtgtgaaagggtatcggcagggcgatgatcggttggagagaaccgtacgggcgataacggcggatcctgtactctaaatagatagggtaatgtttaatgtactgctttaggagcttggcgcctttgtagaatgtgataccgcgaagcttatgctaagctctgtcgaaaccctggtacatctgctcgtcatgaaccaagttgaaaatttcctgagtcatggattggggcagatacagactctcctcactgttagaatttgtgaaaatgatcaagctattttctaggtggtagggtaacttcttaacttggggatcctgttgggcgtcaacgctttctagagtgtcgattagggctgaccagcgagtgtctgactggtatcctcgtaagatgcgatccttagtgtcgtcgcttagctggagcaccgatgctgtaaggaggtacgctgtgggttggtctactgtaggttgtttaaatatatacggcgctgggatatcctcgagattgtcttgtgtgccggggactgacgggtccgtatatagtaggcgggaaagagtgtcagcgatcttattagtttttcctggtctatggaagatgtgtaggcgaaactgttagatgaactgggacgcacggactaggtgaagattttagcgttctaaagaaatagaactcaagtttgttgttttagcaatacctatagtgctactatggtcggtgtataccacagccggaaggttgctaggacaggcctctaccaagtggcgtaccttgcggagggtctagtagagggcggaaacctcgagcttagtgggctagtaattcttctctgcgtctataagaagtcggctgaggaatatgatcggctggatctctgtagcagggggtggttttgaaatgtccttatgagtgaacgttgtctttgtatgatagattgtggcactgtgccctgtttcctttgaaccgtcggtatcgatatagagctggtgtgtgggatcatggtgtgctagccatttaggttcgtggaactcggcctggagtagacgaaaactcttgagctcagcttgggagggtttattgagaatggcttgtgcgctctacgctcggcgctgggggcctttgatcgggctccctttcagtaagtttgtcttgtggacttggagtggttccgatttctgtgtgtagcttttgatataatggcgaagatcacccgtcattctaaggtatgtttctagctgcttacatgtgcgcggaaaaaccagtgaggttattgcctttaccttctcggcggttgttaacatgcctacggagttaatgtccttgcctagtagggtcaaacttggaaacctaatacgcgctttcttcgggtccagagtgatattgaattcgtctagttttgcgaatagtaggtggagtttagcaatatgttcgttaagtgtatcgccgaccgcgaagatattatcgatgtaggttcgacactattctcgaaacgcgcggagtatattgtctatctagcgttgtatataggcgatggagtttgaattgcctatggtaacgacgtggagaacttcttaactgtggtgcgatatgacagcttagtggctataatagtcggggtggatgtgctattgatagaagaattttgccgtgtctacgattgtgatgaaacgcttgccttttgctaaagcaataatctcgtcttgtcctggcaatgggtataggtctggaactaagttcttatttgtcgggcggttgtcgaccatggcgcgaccgacccgttggagcttggcgttacctttgtcgtctatacgagtgacccatttctatataataaaaatagggttcacgccctaggcttggtatttagtaaacgatatctttccttaagcatatagagtatcgaatgtattgtcgatgacttgttggctttctctcgcctatctgtagacttgtgaacgctgtggctttgaaccagggactattgggagtcttatccattcgtcttataggatatctataacactggggttagaccaaatattatattgcttataaatatcgcggagtactgcagctgttttaggcgtcccatagattataatactattaggtagtactgtttctagtggatgtcccggccgagcgtaggctgtagatattggcaggaccttctgtatgtccggtgtgaaaatagtatcaggaagtctattaggaagtctatctggcagccggggcaagttgttaatagcggccagataggcagtgacagagtcgtgaacgtctcgattaatcaatggggggcggggctcgaccgcttggggctgcgatgccagaggcgttacttcggtagaaacttggtaggcggatgtgaagtctggctctaaaagttggcttatacgatccttcttcctaatgacttgtgttcggtcggtgttgttaacggcgtgtatatatgtgaaaccggcgtcaaccatctgtgccggaatcttaaacttgctgttgcctggcttgaaaacgaagtcacgatccttcggtaaaatcgacttcacgataatggggatctgtgccgcctggcgtggggggacctcgattttagaagaagtgtagaccggtcttttactcatgtggtgtggttttgcgcagagggcaataggaaaagtcaagttttcgcaggacttaatgatcgcctgggaacgtgggaaatcgagtataaacccttctggtcctagaacatccataccgataagaagctgggcacagaggtccttgacgatgtgggcctcgattcgtagctctgcggctatatctttgttcaggaagtaaacttgaatcacgatgtagcggtcggataggtgttgggaaccgatcctacttataggaatcgggctgatagggtactgggggtattggagtgatgccgctagctttgaatcgattaaagtcataacacatccggagtcgaggcagcaagtgtttagcttgctggggcttccaagtccgactgtggccgttgtatatcgccaggatcgaaatgtatagccggggacgtggtcggtctgtctggccgagtggatgatgcgataagcgggattcgcgaaattagcgatagctttagctggtatagcggcagcagcttgaggcttacagccgttaagatgctgatacagcttggtgttcgacttgaaaacctgtaaataggataaataagtgactgagtactcgctgtcgactgtatatagctgggcctatgccggcggatcggcctgggcttgaaaaccggattggtggtcgttatcctgtaggccggtagggtcagcgaaattcgcaccgtatgggtccttgtcggtgtaaaagtcgtcctcgaaatcctgttaatcgttgtcgttaactaggacgtcgtcctgatactcctccaggctattgttattagcttgggagtagtcatttgactgatgatagtcagtatctgtatccatgtggtatgcccgctgaggtttattccaaacagtacgctgggagttcccagagccgttacggccggactattggcggccaggattgttccaggtctgctgagcttgaactccctgctatagacgttgttgtctctgaaaggtttgggggccttggttgctttgtgctgggttctggggctgatactgatgggactgatattgggctcctgtggcttggtatgggcgctgaggagtctgctgagcctggccacggggcgctggagcctgttgttgtctatatccggcctggctttggggtagaccttgatagtcttgggctggcgagcggttgtagccgtacgggcgctgagggtagccttggcgctggtcttgtcggtgatatggggccgaattgtcctgtcgcggcctattgtttctaaacctggtagtcaactgactctggcgcttggttgccatatctttctagtcttgatagtggtggtcaaggctgttcatgaaagtgactaacgaggtagtctcagttggctctgggatgtcgcgacgaagcgtaggctctaggttctggcgaattcgtaataactggtcgagaacatctgtcgtacccgtagctttgcataggcgtaacataccctgcgcatattctcttggggtgcggcctcggcgtacgtcatcccattcgtatgtgtgcttgtcaagctggagaagggcctcggtacggttgggtctgaaacgccgcgtcatcatggaaaaccatccatcctggagcggaacctggttcataaggcgtttttcgtccgtggtcagctcctgcgaataccatcggagcgcgtcacctcgtaggcagctatggatgttcgctcggacaacagcttccgacttcaggagtattaggtctgtcatacgatctacaaacgtatgcacgtcggagtagacgcaaagattttggactgtgtccattccatccttaaaactcttcgaaggatcgaaaacgccaatttcggacgctttccacgaggtatcggtagtagccaattggcctggggaaccttgctcgccctggggaccttggttaccttgaggcccgcgaagagcgttggcattgttccgaaggcttgtctgtacggctttctcgataagctccgtaaactgtgccatatcgaaaccgggcaacggtggggaagcagccggagttggcgtgtcgcctgtgtggccaggnnnnnnnnnnnnnnnnnnnnnnnnnnnnnnnnnnnnnnnnnnnnnnnnnnnnnnnnnnnnnnnnnnnnnnnnnnnnnnnnnnnnnnnnnnnnnnnnnnnnnnnnnnnnnnnnnnnnnnnnnnnnnnnnnnnnnnnnnnnnnnnnnnnnnnnnnnnnnnnnnnnnnnnnnnnnnnnnnnnnnnnnnnnnnnnnnnnnnnnnnnnnnnnnnnnnnnnnnnnnnnnnnnnnnnnnnnnnnnnnnnnnnnnnnnnnnnnnnnnnnnnnnnnnnnnnnnnnnnnnnnnnnnnnnnnnnnnnnnnnnnnnnnnnnnnnnnnnnnnnnnnnnnnnnnnnnnnnnnnnnnnnnnnnnnnnnnnnnnnnnnnnnnnnnnnnnnnnnnnnnnnnnnnnnnnnnnnnnnnnnnnnnnnnnnnnnnnnnnnnnnnnnnnnnnnnnnnnnnnnnnnnnnnnnnnnnnnnnnnnnnnnnnnnnnnnnnnnnnnnnnnnnnnnnnnnnnnnnnnnnnnnnnnnnnnnnnnnnnnnnnnnnnnnnnnnnnnnnnnnnnnnnnnnnnnnnnnnnnnnnnnnnnnnnnnnnnnnnnnnnnnnnnnnnnnnnnnnnnnnnnnnnnnnnnnnnnnnnnnnnnnnnnnnnnnnnnnnnnnnnnnnnnnnnnnnnnnnnnnnnnnnnnnnnnnnnnnnnnnnnnnnnnnnnnnnnnnnnnnnnnnnnnnnnnnnnnnnnnnnnnnnnnnnnnnnnnnnnnnnnnnnnnnnnnnnnnnnnnnnnnnnnnnnnnnnnnnnnnnnnnnnnnnnnnnnnnnnnnnnnnnnnnnnnnnnnnnnnnnnnnnnnnnnnnnnnnnnnnnnnnnnnnnnnnnnnnnnnnnnnnnnnnnnnnnnnnnnnnnnnnnnnnnnnnnnnnnnnnnnnnnnnnnnnnnnnnnnnnnnnnnnnnnnnnnnnnnnnnnnnnnnnnnnnnnnnnnnnnnnnnnnnnnnnnnnnnnnnnnnnnnnnnnnnnnnnnnnnnnnnnnnnnnnnnnnnnnnnnnnnnnnnnnnnnnnnnnnnnnnnnnnnnnnnnnnnnnnnnnnnnnnnnnnnnnnnnnnnnnnnnnnnnnnnnnnnnnnnnnnnnnnnnnnnnnnnnnnnnnnnnnnnnnnnnnnnnnnnnnnnnnnnnnnnnnnnnnnnnnnnnnnnnnnnnnnnnnnnnnnnnnnnnnnnnnnnnnnnnnnnnnnnnnnnnnnnnnnnnnnnnnnnnnnnnnnnnnnnnnnnnnnnnnnnnnnnnnnnnnnnnnnnnnnnnnnnnnnnnnnnnnnnnnnnnnnnnnnnnnnnnnnnnnnnnnnnnnnnnnnnnnnnnnnnnnnnnnnnnnnnnnnnnnnnnnnnnnnnnnnnnnnnnnnnnnnnnnnnnnnnnnnnnnnnnnnnnnnnnnnnnnnnnnnnnnnnnnnnnnnnnnnnnnnnnnnnnnnnnnnnnnnnnnnnnnnnnnnnnnnnnnnnnnnnnnnnnnnnnnnnnnnnnnnnnnnnnnnnnnnnnnnnnnnnnnnnnnnnnnnnnnnnnnnnnnnnnnnnnnnnnnnnnnnnnnnnnnnnnnnnnnnnnnnnnnnnnnnnnnnnnnnnnnnnnnnnnnnnnnnnnnnnnnnnnnnnnnnnnnnnnnnnnnnnnnnnnnnnnnnnnnnnnnnnnnnnnnnnnnnnnnnnnnnnnnnnnnnnnnnnnnnnnnnnnnnnnnnnnnnnnnnnnnnnnnnnnnnnnnnnnnnnnnnnnnnnnnnnnnnnnnnnnnnnnnnnnnnnnnnnnnnnnnnnnnnnnnnnnnnnnnnnnnnnnnnnnnnnnnnnnnnnnnnnnnnnnnnnnnnnnnnnnnnnnnnnnnnnnnnnnnnnnnnnnnnnnnnnnnnnnnnnnnnnnnnnnnnnnnnnnnnnnnnnnnnnnnnnnnnnnnnnnnnnnnnnnnnnnnnnnnnnnnnnnnnnnnnnnnnnnnnnnnnnnnnnnnnnnnnnnnnnnnnnnnnnnnnnnnnnnnnnnnnnnnnnnnnnnnnnnnnnnnnnnnnnnnnnnnnnnnnnnnnnnnnnnnnnnnnnnnnnnnnnnnnnnnnnnnnnnnnnnnnnnnnnnnnnnnnnnnnnnnnnnnnnnnnnnnnnnnnnnnnnnnnnnnnnnnnnnnnnnnnnnnnnnnnnnnnnnnnnnnnnnnnnnnnnnnnnnnnnnnnnnnnnnnnnnnnnnnnnnnnnnnnnnnnnnnnnnnnnnnnnnnnnnnnnnnnnnnnnnnnnnnnnnnnnnnnnnnnnnnnnnnnnnnnnnnnnnnnnnnnnnnnnnnnnnnnnnnnnnnnnnnnnnnnnnnnnnnnnnnnnnnnnnnnnnnnnnnnnnnnnnnnnnnnnnnnnnnnnnnnnnnnnnnnnnnnnnnnnnnnnnnnnnnnnnnnnnnnnnnnnnnnnnnnnnnnnnnnnnnnnnnnnnnnnnnnnnnnnnnnnnnnnnnnnnnnnnnnnnnnnnnnnnnnnnnnnnnnnnnnnnnnnnnnnnnnnnnnnnnnnnnnnnnnnnnnnnnnnnnnnnnnnnnnnnnnnnnnnnnnnnnnnnnnnnnnnnnnnnnnnnnnnnnnnnnnnnnnnnnnnnnnnnnnnnnnnnnnnnnnnnnnnnnnnnnnnnnnnnnnnnnnnnnnnnnnnnnnnnnnnnnnnnnnnnnnnnnnnnnnnnnnnnnnnnnnnnnnnnnnnnnnnnnnnnnnnnnnnnnnnnnnnnnnnnnnnnnnnnnnnnnnnnnnnnnnnnnnnnnnnnnnnnnnnnnnnnnnnnnnnnnnnnnnnnnnnnnnnnnnnnnnnnnnnnnnnnnnnnnnnnnnnnnnnnnnnnnnnnnnnnnnnnnnnnnnnnnnnnnnnnnnnnnnnnnnnnnnnnnnnnnnnnnnnnnnnnnnnnnnnnnnnnnnnnnnnnnnnnnnnnnnnnnnnnnnnnnnnnnnnnnnnnnnnnnnnnnnnnnnnnnnnnnnnnnnnnnnnnnnnnnnnnnnnnnnnnnnnnnnnnnnnnnnnnnnnnnnnnnnnnnnnnnnnnnnnnnnnnnnnnnnnnnnnnnnnnnnnnnnnnnnnnnnnnnnnnnnnnnnnnnnnnnnnnnnnnnnnnnnnnnnnnnnnnnnnnnnnnnnnnnnnnnnnnnnnnnnnnnnnnnnnnnnnnnnnnnnnnnnnnnnnnnnnnnnnnnnnnnnnnnnnnnnnnnnnnnnnnnnnnnnnnnnnnnnnnnnnnnnnnnnnnnnnnnnnnnnnnnnnnnnnnnnnnnnnnnnnnnnnnnnnnnnnnnnnnnnnnnnnnnnnnnnnnnnnnnnnnnnnnnnnnnnnnnnnnnnnnnnnnnnnnnnnnnnnnnnnnnnnnnnnnnnnnnnnnnnnnnnnnnnnnnnnnnnnnnnnnnnnnnnnnnnnnnnnnnnnnnnnnnnnnnnnnnnnnnnnnnnnnnnnnnnnnnnnnnnnnnnnnnnnnnnnnnnnnnnnnnnnnnnnnnnnnnnnnnnnnnnnnnnnnnnnnnnnnnnnnnnnnnnnnnnnnnnnnnnnnnnnnnnnnnnnnnnnnnnnnnnnnnnnnnnnnnnnnnnnnnnnnnnnnnnnnnnnnnnnnnnnnnnnnnnnnnnnnnnnnnnnnnnnnnnnnnnnnnnnnnnnnnnnnnnnnnnnnnnnnnnnnnnnnnnnnnnnnnnnnnnnnnnnnnnnnnnnnnnnnnnnnnnnnnnnnnnnnnnnnnnnnnnnnnnnnnnnnnnnnnnnnnnnnnnnnnnnnnnnnnnnnnnnnnnnnnnnnnnnnnnnnnnnnnnnnnnnnnnnnnnnnnnnnnnnnnnnnnnnnnnnnnnnnnnnnnnnnnnnnnnnnnnnnnnnnnnnnnnnnnnnnnnnnnnnnnnnnnnnnnnnnnnnnnnnnnnnnnnnnnnnnnnnnnnnnnnnnnnnnnnnnnnnnnnnnnnnnnnnnnnnnnnnnnnnnnnnnnnnnnnnnnnnnnnnnnnnnnnnnnnnnnnnnnnnnnnnnnnnnnnnnnnnnnnnnnnnnnnnnnnnnnnnnnnnnnnnnnnnnnnnnnnnnnnnnnnnnnnnnnnnnnnnnnnnnnnnnnnnnnnnnnnnnnnnnnnnnnnnnnnnnnnnnnnnnnnnnnnnnnnnnnnnnnnnnnnnnnnnnnnnnnnnnnnnnnnnnnnnnnnnnnnnnnnnngctgggagttcccggagccgttacggccggactattggcggccaggattgttccaggtctgctgagcttgaactccctgctatagacgttgttgtctctgaaaggtttgggggccttggttgctttgtgctgggttctggggctgatactgacgggactgatattgggctcctgtggcttggtacgggcgctgaggagtctgctgagcctggccatggggcgctggagcctgttgttgtctatatccggcctggctttggggtagaccttgatagtcttgggctggcgagcggttgtagccgtacgggcgctgagggtagccttggcgctggtcttgtcggtgatatggggccgaattgtcctattgcggcctattgtttctaaacctggtagtcaactgactctagcgcttggttgctatatctttctagtcttgatagtggtggttaaggctgtttatgaaagtgactaacgaggtagtctcagttggctctgggatgttgcgacgaagcgtaggctctaggttctggcgaattcgtaataactggtcgagaatatctgttatacccgtagctttgcataggcgtaacataccctgtgtatattctcttggggtgcggcctcggtgtacgtcatcctattcgtatatgtgcttgttaagctggagaagggcctcggtacggttgggtctaaaacaccgcgttatcatagaaaaccatccatcctggagcggaatctggttcataaggcgtttttcgtctgtggttagctcctgcgaataccatcggagcgcgttacctcgtaggcagctatggatgttcgcttggacaatagcttccgacttcaggagtattaggtctgttatacgatctacaaacgtatgtatgtcggagtagacgcaaagattttggactgtatccattccatccttaaaactcttcgaaggatcgaaaacgctaatttcggatgctttccatgaggtatcggtagtagttaattaacctggggaaccttgctcgccctggggaccttggttaccttgaggcccgcgaagagtgttggcattgttccgaaggcttgtctgtatggctttcttgataagctccgtaaactgtgctatatcgaaaccgggcaacggtggggaagcagccggagttggcgtgttgcctgtgtggctgggaccctgatttccgttgttacggctgggacccggacctctgttatttgccattttttgcgggaggtcagagagtttggcttcccgtagtaggctcgatagacctgctatggggctggcctcgctgttgtaaaaacgtgaagttaatcgtactcttgactgtaccgggggtcgttctggggtcaggtgtttaatgccggccttgtgagagtggaggtctgcttggtcgtcttcggcttgttcggttcccggagactagacttccgcctggtcgtcttctgcttgttagtcttccggagactggacttccgcttggtcgacttcggcttgttgagactggacttccgcttggttgacttcggcttgttggtcttccgaagactggacttctgcttggtcgccccgtagaaggtctgtgtggctgtccttagcctgtggtgcggaattttcgtccttggttcggaaaaacttgctgtcgtaactgtctggccggggactgaaacgaggctgccgttgtatagtagcgggcctgtgcgtgtagcgtatgatagcagtagcttgggcagtcggtcggtccgaaatgggcatcgaagactggggtgtagaaaggtgtatcacagcagcaggttgggcagtcggttggtccgatacagacgtcgaagattgaggtatggaagccggtgaactgggaggcttgctcgtagttcgcttaggtcggggtctcccgagcggacacgtaggctcgctcgacagaggggttataggacttggaacggcgaggtgagatgtcagacggaggaaatccttgacggccttgttgagtatagacctgtcgatgggccaggaaggtggaaatggatcctctgaagatggaaggatgacggaagtggatggcgaggttgagggattggcgggcccggcagggggagggggcggggacgaggctgccgtcgtgtagtagcgggcctgtgcgcgtagcgtatgacagcagtagcttgggcagtcggtcggtccgaaatgggcgtcgaagactggggtgtggaaaggtgtatcacagcagcaggttgggcagtcggttggtccgatacagacgtcgaagattgaggtatggaagccggtgaactgggaggcttgctcgtagttcgcttaggtcggggtctcccgagcggacacgcaggctcgctcgacagaggggttataggacttggaacggcgaggtgagacgtcagacggaggaaatccttgacggccttgttgagtatagacctgtcgatgggccaggaaggtggaaatggatcctctgaagatggaaggatgacggaagtagatggcgaggttgagggattggcgggcccggcaggtgaaggggttaggataatgataacgcgggaaagtgtatctgcgtcgaaatcacctgactaggggcgtgcctcctagcgataattgtcgaactggattgcaagctgggtggcccgacgagtacgcttatccatggattgttatagtagcggctcggcactgtgatcgacagccttaccgtagcggcttggcactgtgatcgacagccttaccgtagcggcttggcactgtgatcgacagcgtggtcgaccgccgatcgtgccaggcttggtgacctctgaccttggcatataggggaacccctgaggtggtcgaacttgttaaaacaaacccgagagagatcctctcggaagaaaaaaaactctggatgaaaccaggacgtgctaccataaatgtggcaagtaagcttggtggggaagatgatgatattatgaaccccttgttgggggtgctaactagctaactatgactaagctgtgacatcgacctcgtcattcaagcccacactcacttctacgagcgcaatgggcccttggacaatgaagtcattgatcctgcaggtttgaataatcccaaatccccttggtatattactagcgccgcccctggccactatgacggattggacagcgttgatacccccttgaagcctgatgctgtgtatggagaggataatgcctacgaatggagcaagatcaccttccacaactgcactcatatgactcatgaatttgtgtccagcagcaacaacactattctcgacactgcgaccttgttcaaagattgcaagtgcggttcagggaagggcaagccctggatgtgagctcgacatcgatattgagaagccaatattgtgttgttttgtaaatcattgtttcctttggggacatacggattagggcgttcagcctcgaattagatattctcatgtgtggaccagcactttcggaatgcgtttgtgaattgaaataaatttgccgcttgcgagttgcaaaatatgaacccattagtacgccatggatagatgtaaacaattatgttcaagattaattaatacccttgtaggctagactatatgccgaccccgaaggaggcgttttacctggtccccggccgacgacatgggctgagtgagttaaccgcagccggtaacagtgataccagtctcttcttgttcaaacacccagtgagactacgccaagaagacaaacgagaggaaatgcctagattgctgcaaccagcactttgctatggcaacgtaagagaaaaaaggcacaatggacttggccgcgtggcaggattggattttctgaatcgccattgcttggaaatccagaattctttttttctattttcctttataggcaggggagcaattgtctgtctccatacacctcacctgaataggcaatagactaggtcaggggcctagttcaaaggggattgtgcttggaaataccccggccatgattggctggaagttagccctaactcaggcagaaaacaatgtattaggaatatccagcaagcaaagagagtgtgcaaaaatatgtatatatacgcatattttgtgctattgccttgcgagatgcgacaaattctcttgatcttcacaaagaaataatcactcgtcatggctagcactatctacatggcaagtgagcatgtggtcgaacaactaaatcaaacccatgccgccaacgaaaagcatttcgattcaggggaggtcatgcgagacatgattattggtctggctgatggaatgacagtaccgtttgctctgacggctggtctatctagcctaggctcttccaagctggtcatcctcggtggtcttgctgaactcttcagtgggtcgatctcaatgggcttaggggcctatcttgctgctgtaactgatcgagaccattatgagagcgaggagaaacgagagcgtgaagaggttgtctccaagccaaatgcagaaaaggaggaaatccatgggattctctccggttacgggatttctcgagaggcaagccagaatgttgtggattgcctgtctgaaaaccatgaaaattggatccgggtatgtcagcatcctagataagaatcaatggtgatattggctaacgtcgggacctagttcatgatggacttttgagctgcaaatggaggagccgaacgtatccagagcgtggatttcggcagcaacgatggggatctcttatttcatcggtatggatatctgctctgctattctttcctccttccacgacttatctgaggacctgactaacacgcgagtacttgtttctaggcggcctccttcccatgataccctacttcgttatgcacaaggttgtccacgcgttgttcgtatccatcgggatcacaattgtgattctggtcggcttcggcttcatgaaaatttatgtcatgatcaagacgaaacaagcaggactgtacggagcggcacaggccttgttggttggcaccatcgccgctggaaccagttatgggattgtgtatggcatcgatcatagcaacctttatacatagcgtgttgcgcttccccgggtcaaacacagtttgttatctatgggggaaattgcatatggaactttataaatgagggggctactgaaaaaacgcatagttatagcccgcctggaagatttagacatttttgaaaatttggaaatcctatgtgacgaaagacagcatgaacatttctcaaagccactaaggctcttcgatctatcaccatctcaaataaaatatttcatgatttttgcaaagcccggttcttgcattctcacacaatctctatgatcacataccatgcctttcaatttacgttcaaacgctatatgctgatctcatataatgactcttctcatagtgagcaagatttgcacccaagaaccgaacgccctcacaccggtaaatcttcgaagacgctcagaaaccatcagtatattgtagtggtctccgctgagccagtcagacatgatgggcctgaaatctgcatgagatcaactgaaattgatgaaagcactgataaagactcgtggtttttcttccgtattccaattcgccctgaacagcaccgcaataagacctacaccgtgatcaccacagcgatagaattgttgatcaccacagatcacgatgcatattaccaagtgagcctgatatcgccatttcagaattgcaaagaattcgatgatatgtccaatgtcctatgaacaataccaaattttgacttccccattactgcagaacaggaaatttcccaggttctggtcccaaaactcagctccgtgctcatatagagtcttaagggccttttcaagttgagtctccaacgtcttctcgtggacatcagatttagagcgttgacgaagagtgattccatcaatttccgagaggataagcgccggacacacattgaaagaaccttgcccaaaaagagttggaattaaggtccctcgaagcattttcaatctatcgtatgcatgtatctcattccggaactcgtcatcccatccatccttcctttacttgacaatgactgattttagaagaccaagaccaggctggtcaagttacaagcggcataaagtcggacgacagtttttcagcaccgtaaccgaaatcacagttatgggcctgtcatctagatagaccgtctactgctgaatgagcttggtaaagtcttgcattaatgtctagaaatcggatctcacctgagaaggatgcacttcttggacaatataatccatgacgtgaagggcgaatagtgcaggtgggagaatctaagactagaaaagttagaggaagggagtatgatatggcagagctagaggaagcaagggttccagggagggaagtcaaaaagcaaaaaaaaaaactagacctacatcaggctttgtattgagatatggtaactgtatggatatgtacatgggagacatggagctgatagagtagcatacacctgccattgatcatcttttcagcctcggaaaagatggatatctaactcaaatgtcgatttaaccaattcggttgagatgtttccctaaagcttgctatcttgttgtcagttatactcctcgctccctccatccatggatggtggatgttcgaggtaatgagtcagcaaaattccctcccgccgggcgcactaaccgcttgtggaatgtagcctcaattctttccccaagcctgagagatatagctgggaccatttaattgtggcgaaggcgaagaaaaacacagaatttcatcctaacagatttattgagctgagcgcactggagaaaaagtggcagtgttgcctttgatcgcatttgtcccagcccacccgagaggaaaccgaaaccaactgccagcaacatcaattggactcaaagctggcgcgaatgacattacgaccacaatattcacaagtctgatacaaaaccaatgagtatggatgatcaacgggggtctagaactgcccccttctacgcagtgccatcccgtcgcctcgtcagcgtcgagcaccctgccgtgatccgcaatgtcgacaaggcgatcgagaccttacaaggcgatgccggaataaaagcagtgaggaagcttctccttctggcagaatatagaacgcacactgatattatacagattctcaacccggccacagacggcacactagctaatctggtgttgcggccagaagatgccatggctcgatcggtgcagtcaacaagcatccaatcaaacaatgttttgctcaaaattactgtccccaagcggacaggacggaagcgcaagagaggctcgaacgagcctttcgcagacgcaccggagtcagaagcaactgacgcaccccggcgacggaccgctaaggatctcctgcgcagtctgagtgataacccttctaagtaccagattgagccggtcgggagggttgaactaacacatgtgtttcggggtaatttcactgctctgatttaatcatggcgagtatgctaatatctgatatcaggaatacctgatttcgtttactcgaccacggccagttcatttactaaccggttccgagaccaaattctcccttttgactgtgagtctgcttgccatgaaacccactcgatatgtgactaacaacccacagtcgacaagatgaagcaatttgacatcgacatggccaaaggcgccgccgagaatgcagatctgatcccgccaccatcatttagccacggagacgtccccttccactacgtgtaagagccaccccatcgaaagcaccgagctaagaccaccagtccactaactctccctcccagctatcggcaaaacccgacagtaaaacaagcaatcggcagctccggcaaactagaaacagtgaacacgcaaaccgccaacaaaatcctaacccacctagtcccctacgacatacccgaagtgccatccgagccgcgcgcggacatgctcccaataagcgcactagacgcaggcatgctccgcacaatcgcgacgctaaacgccctctacgaaaaacagcccgcctggacacgtcgcggactacgcaacaacctaacaaccgacgaagaccgtctgaacctccgccacgcaattccatacgtgggctacatcttccgatccgggccatggcgcgatgcgatcatcaagctcggcctcgacccacgcacctcaccagagtaccgacattaccaaacctttatgttccgacttctagcacgggaagcggaggtcgcgcgagacggaggcggcggacgacgccacaatgtgccacgaccgagcgaccagcgcatgggcgaggacgaagccgccagcgggccatcgacgggccatattttcaccggcaagcagccgttcgcgcaagacggacggatctggatggtgggcgagatcaaggacgagcaactgcaggctgagctgtatcctcctgatgcggggcctgggttcctgcgcagcgagtgcgatattgtgaccgatggatggtttgggaatggcacgcttgcgaaggtcaagacggttatgcgacataagattcaggcgttgatggaagggcgggagccggttgatgaggattatacgaaaattatgcagctccctgcgcatgcgcggtctgaggctgatttcccgttgttcacgcttgatcccgaggttgcgacgcagaaggagattagtcttgctacggaggttcgggcggttatccggggttcgccggtttggaggaatttgtcagctaatgctgggttggttaggagggagattggggaggggagggggaaggtcaagggaaagcaggctgtgaaggggaagagtgctgagccggaaccggagccggaaccggagcctgagaaggtcgacgaggagagtgaaggtgaagaggaagaaattcagaggagggagatgctggctgctcaggttgcggatgctgctgcggcgagagatgccgatgaagctgatgatgacgacgaggcggacggtgacggtgatggggacgatagtgatgatatggatgaagacgacgacgagtaaagcggctactaaattactggatgattggctatgtctagaacaaatggtactttatgctcaatattgtaatcaaaataatcattttattcgttgttaaaaccgtaggcagactcggagtatattgtgaagcatcagacacaacatagagagtaactcatcaattaggtaggataaagaaagtcaacccgagtggtcgtaatagtgaagcaaaacaaatgcataattcaagccttataccaaaacacccgatacactgaacaccagtgtccaaaaagcgacgaacaccatgacccttcgtatagttatacggcttgagggttttgagtttttgaaatggtacttagtattatgttactttgccagatcgattcgtaagaaaagagtgcatgttaagatctgagtgtacatcgagtggaatatatagaaacatcaaaccaaccggccttgatatcttggtccacttcgtcggtaaattagtagatattaattcttctctacttattcacaatcatacgagcggctgacgacacaaaaaataacgattctaaattcgtgagtggctgcttggtccgttctatgaccaatggcagccagtatgtagccgccagtcccccttcgttcgtgctcacgtgcatatttatcattgcgcctgctgcagctacgttagctggaaaccaagccagaggctctcaggccgagaataggtggtttcatctcaaattatttctcagtcagagtggatctttgcccttgagatgagccatcaaccgctacaattgtgtatttcctccccttctgtcttgagcacgcccaagaggagtaagcttgtcatgacccattgtattaaacatacgatctattcagtggcagatgaggtccatattggattcctaggatgtatgaagacagattatacacctaatgtactcaaaattccgatccatgcttactgaccccaaaaagtaccggtggagcgatgcctatattttattacaattctatgagagtagacatgaaaatctggcagatcaaggccaagaaatttataaagatctcatgctaacgagaacaaaagaaactcagtaaaaacttgaagccatagttctgcagggctgtaccttgaagaaactcggagcggaacaaccaccaccgatatgactgccaaatgcggactagtctttctttcggggtctctgcgatagcccgcgtcctctgttctgctctcgtgaatatcgcgccgcatacaatccccaactttctccccatctccctcagcctctcctcccctgcggggtaattccattcactcattcgctgtccggacttaattcatttcaatggattaggcagttttgttttcccgaaagagtaaatgacttgatggtttctttcgttttaagttctacagtctccgatcttttcgcatatcgaccgagtccacagagcttccgtgacaccacaacacaacatatgagagctcaattcccccccgggaagactgcgcacactccgctctcctcagccggcctcttggcccggccgtcattgctgtttctttccatttagtcgccagcctgtgagaagggtcagatcaaagcgatggagcgaaacatagatatctacgccagcaagctcggcgacgaaaagctaggtatgttgatgaaatctgcacaactagaactgttgtccccttcctgtgctaactaacccgtcgtctcaatagacgtcaaagtccgagccaatgttgctaccgaattacgagacagcattgagcccctatgttcgggcgcaagctatcccatattcttagcgaagctatggccggtattcaaaactattttgaagggggacccggtcttcttcagcatgtcttacgaccaggtgagattattggcacacgcttgcccctagtgaatgttgcgcataacgagctaacaaccttggtcatctattagaaattacgaaattgtattctcgaaacattacaccgattaccgatgggatccccggacgtggagccgtacgctgtcgatatggtcgatctattgatggaacttgcgcggatcgaaaacgaagacaatgccgtgctatgcatgaagacaatcatggatttggagaggaatcaggccaaagccaccgcacaccgggtgcaggctttcttggagcttatccaggaaatgttccagaccatggagcaggtggttcgggatactttcgacactcctaaccaggccacaccgtcgggaatgccatcgacgcccaatgcaacagcacagaacttccagtctccgcgacccagctcgcctgctacctcagtatcagatctgggacccgatcagcagtcgagcaatgttctcctcaagggcatgcaatctttcaaggtcctcgcagagtgcccgattattgtcgtttcgatcttccagacacaccgcgcatcggtgccggccaacgtcaagctgtttgtgccgcttatcaaaacgatcttactgcttcaggcgaagccacaggaaaaggcccacgccgaagcagcagcccaaggcacaatatttacgggtgtgtgcaaggaaatcaaaaatcgcgctgcatttggggagttcatcacggctcaggtgaaaacgatgagcttcttggcatatcttttgcgtctttatgcccatcagttacaggactttcttccaacgcttccttctgtcgtcgtccgtctccttcaagattgcccgcgagagaagtccggtgcgaggaaggagttgttggtagctattcgtcacatcatcaactttaactatcgtaagatcttcctcgagaagattgatgagcttttagacgagcgcactcttatcggagatggccttactgtctatgagaccatgagaccattggcttacagcatgttggccgatttaatacaccatgttcgtgagcatctgagtcgcgaccagatacggcgaacggttgaagtctacactaaaaacctccacgacgatttccctggcaccagcttccaaacgatgagtgcaaagcttcttttgaacatggcagagaacatctccagactagaggacaagcgtgaggcgcggtatttcctaattatgattttagatgctattggtgacaagttcgcatcgatgaaccaccagttcaaaaacgctgtcaaagtttcaagggcgtacaaagttttccgacaagagaccgagccttgcgccgagaactaccttgctgagaaggaccagccaccggactgggatgagattgatattttctcggcttctcctatcaagacatctagtccacgcgatcgtggaggtgacccagtttcggacaacatcttcctcttccgaaacctgatcaatgggttgaaaaatatcttccggcaattgaaaaattgcaacccagacgatgttcagattgacccgaacagcgttcccattaactggtcagaagtttcgtacggttacaatgcagaggaagttagtgtgatcaagaagcttttccacgaaggagctcgtgtgttccgctactatggggtggatcagtctccccctgagatgaactacgcatctccgtttgacttccttgctagccagtacactgccccaatgtcgcgcgaagaaaaggagcttcttgaaagtttcggcactgtttttcactgcattgataccgcgaccttccacgaagtcttccattccgagatcccgtacttacacgagctcatgtttgaacatggggctctccttcacttgccccagttcttcctggctagcgaggccacttctcccgcattctctggcatggtgctgcagtatctcatggaacgcatcgatgaggttggaacttcagacatgacgaaggcaaagatacttctgaggatgtttaagctttccttcatggccgtgaccttgttctccgtgcagaatgagcaggtcctccacccgcatgtgacgaaaatcgtaaccaagtgcattgagctttcagtcacagccgaggaacctatgaactacttccttcttctgaggtctctctttcgaagcattggtggaggacgattcgagctcctgtacaaagagatcctcccacttctagaaatgcttcttgaaacgttcaacaacctgttacttgctgcccggaagcctcaagaacgggatctgtacgtggaactcaccctcaccgttcctgcgcgactcagccacctcctccctcatcttagctatttaatgcgcccaatcgtggtcgccttgcgtgccgactctgatcttgttggtcagggtttgcgcactcttgaactctgcgtggacaacctcacggcagactaccttgatccgatcatgggcccaataatggacgagctgatgactgcactctgggatcacctgcgcccatctccttacaaccacttccacgcacacaccactatgcgcatcctgggaaaacttggcgggcggaatcggaagttcctcaaccacccgccagaattgtcgttccagcagtattctgatgataacccaagcttcgatatcaggctgatcggtcccaacgagaagcggccttttcctgtagatatcggtattgatctcgctgcggggaaactcatggaggttcctaagacagactccgggaaagcttcagacatttactacaagcagcaggcctaccgcatgctcagctcccatctcaagctccaaatcggttacgacaacatccccgaagacttgacaatcttgatcagactccatgccaatgatctgttcgaaaataagataggtgctatggcagatattcttgacaagtcggaaagatcggcctctattccaaagaagattgcgcaggaagcaacagtaaagaaacttatcaaggcttgcatctttgccaccactatccccgagctcgaaccagccgcttcagcatttgtggcggatgtgtgcaagcacttcgctcttgtagaggtcggccgtgctctggctcaaatccgacacagtcgcaaagcctttgacgtcgcaaacggggaaggccctgtgtacctcgactctaggattctggctgaagctttagttgagtgtttatcatccgatgaggtccacgtccgagaagcagctgagcaggcaatggtggttgtgaaggatgccgcaggcgtcatcttcggatcgcccgagaaagcagccaagctcccattcttcgtgcatctgggccgcgtcttctgccacagctgctacagtgaagagtggttcaccaaggccggtggcagtctgggaattagcctgctctcaaccaagctggacttgggagatacatggctttatgagcgacatgtcgagttttgtcgtgctttgatgtatgttgtcaaggacacacctgcggatctccctgctgctacgagacttcagtcacaagaaacaatgactttgatgctgcgaagatgcggcaaactcatccccaaagaagatttgaaaaacgagaagagccgcttgtatgctctgtgtggcttgttcgtgtttgaactcgcacacatgaataaacatgtccgggagactgctcgtcgttgcttcaccacattgaaggaggtccttggatgtgaggtgcatgagcttattttccccgttagagatcgtctcttacagtctatcttcaacaaacctttgcgtgctctgcctttcccaacacagatcggtttcattgatgccatcacgtactgcctcggccttcacaacgacatcgtcaccttcaacgaaccgctgaaccgcttgatgctggaatctctcgccctcgctgatgccgatgatgaatctctagcatctaagccaaacgaattcaagactgcagatatgattgtgaatctgcgtgttgcttgtcttcgccttctatctatggcaatgagcttctccgagtttgccaataccccacagaacacgagcagagctcggataatttctgtcttcttcaagtcactctactcaaagtcacaagaggtgattgaagccgcaaacgcgggtctccgtgatgttctcacccagaccaacaagcttcctaaggatctgttgcagaacggactgcgccctatcctcatgaacctccaggatcccaagcgcctcagtgttgctggtttggatggtcttgctcgtcttttgacactcctgactaactatttcaaagtcgaaatcggcgcgcgtctgcttgaccatatgaaagtcattgcggatgatgccgtattgcagaaggtgtctttcagcctagttgagcaaaacccagcgatgaagatagtggctgccatcttcaatattttccatctccttccaccggccgccacttctttcatggaacatcttgtcaacaaggtcttagatctcgaactgaagcttagaagaacgtcgcacagtccattccgcaagccgcttgtgaagtatctcaatcgctaccccaaagagagtctcgcattcttctttgcgcgcttcaaggatgagcggtttggacgattcttcggacaaatcttggcggatcccgagagtgaaggactgcgaaacgcgatcgtcgctgacacggatggcttttccgctgccgcctttggtcaggatactggtgatggcaagaacactgctgctatcaacggagtctatgtcgcacattctctttgttcctacagttcaaccaagcgctggttggtctcacatgcagagatgagaaacaagctcctgacttccggtagagatctggagaggaagcttcgtggtgatagtctgccggctgatgagcgactccgagtggagcaagccgaagaccaattgatggatatctttaccatgtacttggcagaggccacccacgatctggacttcctgtttgaagtgattgacgggctctccgccgatgagttgaaacgcacgcttgcgcttcctaagttcatctataagagcatcatcaccaatgagtccatcgattaccggcgttctgttattatgcgctgtctcgacctctacggccagaagagctgccctcagaagaccaagacttatgcctttcgccacctggtcaacccgatctttgccatggatgtccagatcacttggaatagccctccgaacacacctaagttgatggataagagcatgaccgagtctatccagagtcgtttgtggaagccccagctggctgatctgagcgaggagtccaatcaagctggcgtggaccactcacgtatggagttgctccagctgtctgctttgttgatcaaatatcattcacagacggtgcaagattctcgcaaagatatcatcaagtttgcctggaactacatccgactcgaggatatcatcaataagtacggtgcctatgttctgatcagttacttcattgcacactacgagactccattcaagattgtaatccaagtctatgtcgcattgctcagggctcatcagaatgaaggcagagcccttgttacgcaggctcttgatgtcttggctcctgtcctccccacgcgaacagccaacagctctggagcagaggcacggtaccccctgtgggctaaatggccacgtcgtattctagccgaggaaacagccaatctccaacaggttatgagtatcttccaattcttggttcggcaacctgatcttttctacgagtcaagggagcactttgtgcccctcattgtcccatccctagtcaagattacaggtccaccaaacacctcgaacgacagcaagaaactcgcattgaacttgatcagcttgatttggcactgggaagagaaacggacccagaatgccgaggctagccacttggccaatgggacatccgagtctccagttgccaggaaacgcaagctggacgaacctcaagagccatcgccgtcccccgctcttggtcctcccagtagccgtgaacgatcggactacacagtacccaccgatttgcgcgcgtcattgatcaagtacctcatcacattcatcaccaccatacccgaacgcttcctggttccagctgcccagattcgcctaatgcccacaacaaagcagcaaaaccctgtgcccaccggtggaatgatcaacaaagctataaacttacttcgcagcctcctctctcctgagtactggggagatctagacattgatctttaccaaaaggcgactgaaccaatcctagtgggtgacaaaggggacaaagccgaggacaaaatcacctacactgtcaatacgctgcaggttattagggtgctcatagcagctaaacccaatgagtggattgctgctcgtcttcctactatccagaagcttctcgaaaagcccttgaagtcggacaacccagagattcaggattgtctacatggactagaagatgacatggatgtcttgcacaagctgccgcctcctgtccgtcgtgttctggaggctattccagatgaacagcctgatgacgaggatgcgatggatacggagggaacgccttcggagttcggttcatacttgtctgccatcgccactgaaacactttctgccagcaactacgtgtcaagtctgaacatcttgtggacgctctccaaggtcaagcccgccgaaatcgatgcccacattcccgcggtgatgaaggctttctctacaaagctcgcgaaggaacatgttgctgcttcaactcagaatggagcccagctggcaaacggaaccaagcccaccgaaggagctccaaccatagatcaacaagagtttgagattggagttgatctcatcctcaagactattgagctcatatctgttagaatgtctcatcttggtgaccaacgtcgtccattcttgagcgttctagcacagattgtggagcggtcacaaaatatcgagctgtgcagcaagattttgggcatggcagagtcgtggatcttccattcaaccgagtcctggcccaccctgaaggagaagacagctgtcttgcataagatgctgcttttcgaatctcgacctgatcagacaatgctgaaaaagttccttgatcttgtcattcgaatttacgaagattcaaaaatcactcggactgagttgacagtccgtttggagcatgctttcctgattggcacaagagcccaagatgtggaaatgcggaaccgcttcatgcaaatcttcgatcggagtttgactcgacttgccagctcgcgtctcagctatgtcctcacatgtcagaactgggatactcttgctgactccttctggctagcgcaagcatcacatttattgcttggttgtgtggacatgacaacgactgcccgcttgcaccctgaggacttcaccctgttccccgtatcattcctctttggcagcggcgataaagacccgagaaaagtcgatatcacggtcgatagccagctggagaccttcgtcgcagaccggagacgattcatgtcggacattggcgatgtcagagttcgcgatctggtcgagcctttatgtcagcttcaacacaccgattccaatgttgcctaccagctgtggactaccatattccctctcttctggtctaccctgtctaataaagactgcattgacttggagaaggatatggtaacattgctcactcgtgagtaccaccacagacaactggacaagcgacccaatgttgtgcaagcccttctggagggtaccgtgcgtgctagtaatccccggttcaaaatccccccccatgttatcaaatatctcagccgaacgtacgatgcatggtacactgctgcgatctaccttgaacaaagtgccattaatcccatcattgacacacctactgtgcgcgaaagcaacctggatgcgctcgttgaggtgtacgcaggcctccaagaggatgacttcttttacggaacctggcgccgtcgttgcaaatttgttgaaaccaatgctgcgctttcgtatgaacaacaaggaatgtgggacaaggctcaacaactctatgagaatgcccaaatcaaggcccgctctggtgccatgccattctcacagggcgaatactttgtttgggaggatcattggttgatctgcgcccagaagctccagcagtgggagattctcagcgacttcgccaagcatgagaacctgaacgatcttttgttggaggctgcttggaggaacattgaaaattggcagagcgagggtaaccgggagcagcttgagtcattgatcaagtctgtgtccgatgctccaactcctaggcgcaccttcttccaggccttcatggcccttctccaatatcacaccaagaaggacaatatccaggacttcaacagcgtttgcgacgagtctatccagctctccattcgcaagtggctgcaattgccgaagcgcatcaccaacgcccatattcccatcttgcagcatttccaacttcttgttgagctgcacgatgccagccacatctgtagcagcttggctcagacaaatgaaagaaacttggataccaagtctgccgagctcaagcttcttcttggaacctggagagaccgcttgcctaatctctgggatgacatcaacacatggcaagatctcgtcacctggcgtcaacacatcttccagctcatcaacggcacctacctcagtcttttgcccccacagacgaataatgtggccagtaactcttacgcctaccgtggataccatgaaacagcctggatcatcaaccgattcgctcatgtagctcgaaagcaccagatgccagaggtctgcatcaaccaactcagccgtatctatacccttccgaacatcgaaattcaagaggccttcctcaagcttcgggagcaagcgaagtgtcactaccagaatccgaaggagctcaacagcgggctagatgtgattaataatactaatctgaactacttcgggccacagcagaaggctgaattctacacactcaagggcatgttcctcgccaagcttgatcatgtcaatgaggccaatgaggcgtttggagttgctctctactatgatctccgccttgctaaggcgtggtctgaatggggacaatatagtgaccagcggttcaaggctgacccgactgactacgagctggctagcaatgctgttagttgctacctggaggcggctggcctttacaagagcgcgaaatcccggaaactgcttagcagaatcctctggcttcttagtttggacaacgacgaaggaaagatcgcaagtgctttcgaaaacttcaagggagataccccggtgtggtactggatcactttcattcctcaactcctcactagcttgtctcatcgggaggcgcgcctctgcaaggctgtcctagtcaaaattgccaagttgtacccacaggccctcttcttcttgcttcgcacgaacagagaggacatgctgagcatcaagaaacagcatgatcagaagcaagagaagttgaaccgggccagacagcagcagcaaggatcctcgccaagtaccaagccaaatcctgttgctggtgccgatagttctcctgctcaaaaagcccaggctgcagctgcatcgaccaatccctccccgtcagttccgcctgcgaattcacctgctacgcagaatttagcccaagcacaaatccagtctcctgcgcagccacaaaaccctatgcaggcatccccacatgctggccaacctccgggccaagcgcaccaaactcatctacaagtgccaggtcagactggaacaccgcagcagaatcaggttgcacttgcagacggcgagaaggaacctctgaagaaaccctgggagtactcggacgaaatcatgtctggactcaagacggccttccccttgcttgctctgtctatggagacaatggttgaccagatccacaagaacttcaagtgtcccccagacgaagatgcataccgactcatagttgctctcttgaacgacggactggcctacgtgggtcggatgcctggatcttatgcccaagactttaagctgcctgccgcaaccgaagccaacatcacccgattcgcggagacaattctcccagctcacattcgcaagtccttcgaggcggactttgtgaccaagaagccaaccatgaacgagtacatccacaagctgcggcgctggcgtgacaagttcgaggaaaagctcgaccggagatcacagcacacattcctcgaaaactcttcacctcatctgagtgagttccgcttcctcaagtttgatgaagtcgaggttcctggccaatatctactccacaaggataagaaccaagactttgtccgcatcgaccgcttccttccagatgtggacctcatccgaggcattggtgtctgtcatcgccgcttgaagattcgcggacacgatggcagcatgcaagcatttgccgtccagcatccggctgcccgtcactgcaggcgtgaagaacgcattcttcaattattccgaattttcaatggtcttcttgcaaaacgcaaggagagtcgtcgccgcaatttgtacttccacctgccgttaatggttcctctagcaccacacattcggctggtgcgtgacgattcctcttatatctccatgcagggaatttatgaggattactgccgccgcaagggcattaacaaggatgacccggtgcttttcacaatggacaagatgcgatcattggcagagaccaagcagaacgtaagtgtgccgtacacccttctcatatcaaaagctaacaactcccagcgcacgcccgaccagcaacaggttcttcggacagaaatcctgaccgcgattcaagacaaatgggtcccgagtactgtcgtgttggaatactgccagcagacataccccaacttcgcagacttctggctcttccgtcgtcaatttgcctaccagtacgcggcgattgctttcatgacctacgtcatgcacatcggcaacagatacccgaacaaaatcttgatttctcgttcaacaggcgatatctggggtgcagagttgatcccgactatcaacccggctaaggcgttcttctacaaccccgagcaagtccccttccggttcacacccaacattcagaccctactgggtccgattgcaacggagggtgtgttcgcctgtgcgatgatggcaatcgcccgctgcctgacggagccacgccacgagctggagcaacagctcagcgtctttgtgcgcgacgaaatgatgttctgggctacagctcatcaccgaggtgtcttgccccctggacaactccgcgatctggtctacaacaacagtgaaatcatcgtcaaccgtgctgtcagtcttgccagtccaccggagggtaacttgcctgccaatcagaccaccatcgatctgatctcgaaggcagtcaacccccagcatctagcgtcatgcgatgcattgtggatgccgtatctgtgagcgatgcttgtcggtttgcgtgtttttgtcctgtcaattggcgcggggaactatggctattgtactttctgaagagggggctttgtctgggtttgtttttttctgagcgtgggcgctaggtgcgcagatttacttcacgttactatgattgtgataccgattttttttttgttctaataccttctacgatgtcttgatacttcggaatgttagctctgatagttcttaatggatcgatttaattcgatttgactgttatctgccaatttcatcctgtaacctgtaatctgtaaccaacgcatacgatatatgccatccgggacttaattctcactgatcaatattgcgaagcagaagttcggcgatccacactcacgtttggagtagttatggaattaggtatatgattcataagcaaattcgcgcccggataggctttgttggttgatcttgtcttctctgtgcagtctgttgaacatgtcgtcgacgattttgcggtaagatgggtaacagcttctcccagccgtccaccaaggctatctccatccatcaatcggtttccagatatattaaccagtgcggagttcttattcgagatctcctgccattgaatacattgacaattaggcaattcgtttgccgttgctttgcgccgtagatagtgactccattcggcaggacgttctctcgttgagcgtgtccgaggccattgtataaccgatttagtcattcgctcatgatgtattttccccatggtattcgctgctgtccttttggccatgacattcgccagaacacttggggctcaggtgcagctcgacatgcacatcgggcctctgaagggtgaagtgtccactgattgcttccaattgagggggaggtgagatctgatgctcaccatgctgtgctagtatcaaagaaacgtcgtatattgccgaggatacaggtctcacgagctgaggtatcaccgacaatagaaggggtatccaccgacagattaccagacctataaactcaaggtcacggactagatccgagcacggtgacgggccacggcaggacatactagaagaagatctgtcatttctttagatgcgagttaaagggaaaatgcagtagcaaacagttccccgggaggagagctgtgagagtgataaatcatgactactccgtacttgtgccctacgttgactggtccaatcgggactatttgtaactataaagaagaccattaagacgttatcataattcatttcattgattaaagaaggacctttgtgcaacgtggggtcaccacgacacggtcgctatctccgggttgttcgttgaggctgaaagatcatttcttagccaaggacgcgtccttgtccttcttagggcgggcaaatttcgcccagtaccctccaagctcacttttacgcgccatggccgcctcagcttcacggaattcctgctccgctttagcagccatcgcttcagccttcttgcgtctgaactcctggcgcaagttctctctgtcctcggcttcctctctcgccgctcgaagagcctcctcgtcgatcttttcctgaacagtagcgacggcagcctcgtcaccacgggcttcggtgcgctcgatgcgggcattgcgggttcggatttcgtcgagtgcgtcggcaatttgcatctcgcgcttggagtcaagcatcttgtcttcgagtgcagccatcttgtcacgttccagctgctcctccttggcgccgtgttccttctcgagtcggttgagggtctgcgcctcggtctcgtcgttgtacttctcgtcctcgtcgtcacgccaaactgcgaagttgcgctttgcgccgcgctcacacttgtagtcgttgtctaataattgatgttaggttgtatatagcgaagtggtggcaggatggtctcaaacttactcttggggtcggtacggaaagtgatctcaccgctgcagcgagtgcaacggatgtagaaccggaagattggaatcgacaggtatctttcatcgagagtctccttgcgcgcattgaacttgcgacccttgggaatgtactcgccgcagtgagtgcatttcatcgagtagggtgtcatcaggcggacaggggacagcttggatgatttgccatccttgcgagagcgcttcgaagagccttcgatggccgaaggatcgaaatccggggggtaatactttgaaagaacctttcgctcagccatgatggattttgatggcgatgggaagtatgggaaagaaacaaaccttcgcaagagaagctctggcattatcggggggcatcgttatctccacgtgatcaatcagctcggttatcgccgcttaagtccgatgcttcagatggcgataagggtgaaagtcacgtgtggatgacgataacagaaatcccccgaactggggctacgcgctccccagtcaacggtacccgccaacagattttgaacttaggtactttttgtatgagtatacaatacaaaaggaacaaagacataacttatcacgtccatttccccaaccctaaccagctaaaacatgaataaccagtcctaatatataaaataatttcgattagatccttctgatcgtatgattgattctatacaattggtatagaagtacctatgagaagcatatttacgcttggtatgattctacccatagtagatgcatcacgtgacctctgtataatagaagacaaaaactgctatgatactggtctggggaggtcttccagttaccatcattttgagacttttaatagtaattcagcccctttcttaacccaatacatattctctaggcgaacactctacctacattattgtacatacatgtacggagtagttaaccttccgccatcacagacacgcacggaccactgtttggttcaaaatagggcaaggacccgctcatgtgaaagttgcctgcgactcgcattgcttgggcatatctccgggttctaacagaaatatccatgtctgttctctctttgaatccattctttaacacatcttctctgtcaatatggaaaggttcctgcgctcctggcgacaggacgcgttgaaccgtggccagcatgattccgcaatctacattggggacaaagtcctggcacttactagtaagggctacaagcactacgaatatactgatatactgacttgcttgtgaaggcagtgactccgatgcgttttggctagcccaggtacacttttccaataacaacttcacacgcgccctggccctcctctcccgcaaagatctcgtttctcgaagcactgcctgccgctaccttgctgcgcactgctacataaaacagaatcaattcgaacaagccctctccattctcggtgaacacaaccccacagacctgatccgcaataaccacacccggcgcaaaatccaacaccaaagccatgttacactgcgcaatgggaagagtgcgacaccgcgcagtgatcgagccgaggagagagaacgcgaagatgccaacaatgtacggtttgaagccgccatgtgttatttacgggggctctgcttcgctaagcagaatgcatttgatcgtgcccgagattgctacaaggatgccgtgcggattgacgtgcagtgttttgaagcatttgatcagctcatgaagaactcgctcatgtctcccacggaagaattggaattccttgaatcattggactttgattccgtctcatcccccgatccgatgatggcacaagaagccgcccatttcacgaagatgctctacacaacccggctatcaaaatactcctcccccaccatattatccgatgccaccgaaaccctatccacacattataatcttgcagagaatcccgacattctattgtcccgcgccgaagctctgtatacgcaatgtcggtttgcagaagctctagaactgacatcttctatcctctccgcatctcagtcaaccgacctgtccacaaatcccagcattccgacacagaacaaccttggccatgctccagctatttatccgcttcacttagcttgcctttacgagaccggtgccacgaatgccctattcttgctctctcacatgctcgcggatcattcgcccgaagagccttacacatacttggcaatcggagtgtactacctttcagtctcaaaggtggctgaggcgcggcgcttcttttcgaaggcgtcactgctagatccgcattcggcgccagcttggattggattcgcgcacacctttgccgcagagggtgaacacgaccaagctatcgcagcatatagcactgctgctcgacttttccagggcagccacctcccccaactgttcctaggaatgcagcatctcgctctcaataatatgtctctggcgcacgagtatctatgtgctgctcacgctatgtcgactggagctgctcccggctccgtgccttccctcacgcctcatccctcagggattgtctccgcggttggtggggatccactggttctcaacgagcttggagtggtattttaccatcagaatcatcttagcggcgcggtcgaattatttgggcaagccctggcgctagctacttctctccactgcgaacccagtgcctgggtagctacacgtgcgaatttaggtcatgcccttcgtcgcatgggccgtctgtccgagtcccttcgtgaattcgatgaatgtcttcgcgtgggcgcaggaggcagcagcatgggctactcgccttttttgggtggtggtacgggtggctcagcggcgatcgctaccgcatctggggttgggggctacgaagatcgcgggctgaccggttctcttcatacgtctcgtggccttgtattactggagttgggacgaaccacggacgcggtgactgccttgcatgaggctgtacgtgtacttggagcgagtggtggcgggggtgccgccgnnnnnnnnnnnnnnnnnnnnnnnnnnnnnnnnnnnnnnnnnnnnnnnnnnnnnnnnnnnnnnnnnnnnnnnnnnnnnnnnnnnnnnnnnnnnnnnnnnnnnnggggggggggggggggcggcgccgcggggggtgcaggcgtggctggtacattactttcacgtgcacttgagctctgggcattggaggggcgacaaagggaccatacggcttttgaggagagtatgcgagaagccagcgcagcctcctccaagcgccggggatctacccggtcccgtgaacataaagggaaagagcgagttgccccggaagagatgtctcgacggcgtgggcgtcaggagccctttgtggaaggatggacggaggaggtggcccatgtcgccacagccacagccccggccgaagatgaaaaggttgagatggatctcgacgacgaagctgacggccttttgcgccgagctctcgaccgtgtacgacacagccgacaacgtcgaccagcagtaccttctaccccggatatggatgccaatgagccggctgctccatccagtggccgcagtcgggggacacgacatgggcggagtcactctagacaatgacggggcttttgaatcctcctcaggtgaaattttgcgttatgttccatgcattgcagcgggcgtttctgccagggaaagttggctaggggttggggcaattgctttttttatggatctcatactagacgatcaaacagatattgttagggacattccttatacttgtatctagtttgatggaggaactagaaacggtagttcaaacagagccctcttcacactttagcctttgaagctattttttatacggcgtagcgtcccggctattatccactagaggcaagtactagtatagatcaacagaacagagtatgttgttatgttggagtatacgactatcgcccccaaataaaatcaacaatgaaggaaaaggctcggtgagacggtgacttggtgtcttggcaatttctcttctctttcttctctttgactgtctgtctcttctatgcatatcggaggattagccccgtccaaccaatctcattatatcgatccaatcaaaaaccccaataacgcagttaaaacccaaaaacaggtgatgacgccgctgcccccactgggtgtcgggctgaggctcgccaatccgcccgtacggggggcgttttagcggcgatcgtccgtagttgcgcatcactgccatttctgggggcatgtttcagggtttgccttgatcggcccccttctcttgtttcttgccttgaacactctttagacaattcctctgcataccttctgacacctccagatctctccagatccctccagacaaattccaagacacttccagatcatgccgtgccagtctggatctttaccatgacagcctcatttcctattcgcccacgacgcggcttgtcccttctgtgcgtcataaccgcttttagcttcagcgccatcatcgtcatttggtttggcatgaactccgaccgagaatacattcaccctgttctcacccagttaatccccgccggacactgcgcctgcgaatcctctactaccttccagtgctcgacatgcctcacctgcccagaacccggtctacaaacagaccggtcccccgtttggtcctttgaatacgcccgcgacggtcataatgagactctgaacaagagccagtgcaaagctgccttccccgggttattcgaggatgttgcgcgcggtggcaaattctggtcttcgcatggtcgcttgtcgtcggtagaactaggcgccatcaagatcgaacatggtatggcgcgtgcatttatctctaatggccaattatacgtggtcacggcgcggtccaagggggaggatcaccgacggaaaattctggggacattgagctcaatccatcgtgcgctggccgccgacccagaaagagcttctagacgcgactttgaattcgttttctcggtggaagataaggtcgacgatgtgactaactcggaatggccggtttgggtcttttcgcgcactccgactgaggaaggggtttggctcatgccggattttagcttctgggcctgggataaccgcgacaactacatggggccgtatgaccaagttgtggaacgaatcaaacgaagggatattccttggtcagagaaaacgcctcaattggtttggcggggcaagcccagttttgctccaaaattgcgacgcgcgttgatggaggccgctagggacaaatcgtggggcgatgtcaagcaggttgattggaacacgggttccaatgtccttaagatggaagatcattgccattatatgtttattgcgcatgtcgaaggtgagtctaatttctcttctctcccgcgactcgaggacgccagctgacgacgtgcgctattcaggtcggtcgtactcggcttcattaaaataccgacaggcctgcaattcggtcattgtcgcacacaaactccagttcatccaacatcaccactatctgttggtagcagatggtcccaatcaaaactatgtcgaggtcgagcgcgatttcagcgacttggccgaaaagatggaacccctggtcaacgacaccgaagccgccaagcgcatcgctaataacagtgtgacgaccttccgtgagcgatatctgaccccggcggctgaggcttgctactggcgatcactgttcgatggctacgccggggtgtggaacgggactgtcgaacagtggtccgatcgtaaggaccgcgaacgagggcttcgatacgaatcatttgtgcttctggagagcgtgaagatgtacgaattcgaagctgctatcactgaacaatggcaggctattttgtaaggataggcaaacagaatacgggagactacatacaacccacaataatacgttaatacctaattgcgagccagaatagatattgtctacaacatagtctttgatttaggggtccccgctgacttgaccagcaccatattttattttgccggcagtatagtttgtaatctaagtatttttacatctgaatacgtcgacagcacagcaacttcacgattttatatattagttttgtacggtgactgtgcttggctggttagtaactaaacacaggcggtgagctaggcggtcaaaattaaagacgtagtccggggccgagaacagccccactcgtttccccgagcttcgcattgtttcaacgacagggtacgttgaactcttacatttcaagatttgttcgtacttggacatcaattcatgcttctttgattttatagagtgcttcgttgcgtcattctagtcgatcaccccaccgagcacccatcaagcagtccagtctacttctgtttattcacgaagaccccaacttggttaaaataacccgacaacccagcggtgctagaatcccaccctgtacaaatcagcatacatcatcaagacctagcagaaaaacacttactggcgtcatcttcaaccgatacgcaggatcaacaacccagctaacccttcccagcaaaacaaacaacaaaatcttcacctgcaacaatgcaaacccctgcccaaggcacttccgcttatgcgcattaaacggaatatacgttcctcgaactgtctccctccgaaaccgcccctgcatctcctcaacactctccccccacctctccgcccggaattcgcgcgcatcctcaccccatatatccgggttactatgcaccgcccacgcattccaccccacaaatgtacccttcgcaatgggaagttccccacccagcagtgccggccgcaatgcgacacggttaatgagctgacagacaggcgggaagagacgaagtagctccagcaccacggccgtcaggtatggcagaccgtttataatttcctgggatggattcgggtgagttttggccgtatcaagaatctcctcccgtagccgatcctgtatatcgactcgagtgcccagctgccagaacatcgaggttaccagttgctgggcgttttcatgtgcggttaggaatgttatcttgaggttgtcgcggaattgtttctcggttatgcggcctgatgtgtatgcttcgcccagcatgtgtgagaccatgtctttggattgggtgggattgatttgcgtgcgcttgtgaagcattgccattatcattgtgtacaggcagttgtcgaattcgcgcattgtattgtaggcacttttgcgtgacgggaatagccaggggaagtgatcgaggtccgggaagctgaagtacattggtttgaagagggttgctttgataatagattggagggcttcgattcgaacggcgccgtttggttggcctagactctggtgtgggttagtcttctgtcttcagttttcagctattagagattgaatgttcgtttcagggaggccatggcaaggttgacttgataccttcaaatccaagtccaggaaattctcgctcatcacatccacagcccatttctgtacgtctgccataatcaagattcctctattcgctccaacctccttctgcagatcgattagaacatcgaccagcttcctcgactgcttcagcaaggacgttgtctcaaaaaccttcttttgcaacccggccttcataataccagtataaaccttccaattctcaccatgggcattgatgatgttatcaccaacaagcgtcgcaataacagcatgcggaatcttaatctggctcccggctttcgcatatatatgttcattgcggaacatatcagtcaaccaatccggtcgtgaaacgagcacactccatcttccagcgaaccagactaacacggcgccgtgtttctccagtggagccctgaaccatctttcgtagatctcgtcttggcccattgaggaccataaccccaggattgagacgtagattggaattctgggcagatttggcagtgttcgagagacacggaggtaccaggttaggaagaggagaggtgggaggaggatgattaggagtatggagagaagtatggaggataaggctaaggccatgttgggcgtaggcttgatagatttggtagaaacgagaaccaaagagaataaaacgggggtctgctactctattgctggtactatacagcgaattaggcgtctacttggtccgccgcaccctaatgcattaggtgtcagcagaagtcaacacgcctgcgctgaggtcgtactgtccaccgtacctttttttggccatctttctgctggattctactgctaggtggctttggtgtgttcaatttgcattttggtgattgtgcgctcaacgtttctgtgtggtgaggaatatagtcccccaaatggtactcacaaacggaggttacaggatgtctagcttggcaacttgtggatatagtaatatggcctagtggtcgctttgactgggtcactcctcgactcattttctcatgaccgtcaggtttccgtcggggtgacgcttgatctctgcaggttcaccttcgcgcgagatttgttccataactcatgacggcattcaattatattctcttattgaatgcagactatgtgatgcttaggaagagactcagcctagttgaattggtacagaagattgctatagactagcttgctggtattgtatctattgggttgaagaggaatatgtagacagccacacatgtaccaaagctcttgtccaagatctgaaataggatttgcctaagctcctgctaaaattgtagcagatagcgagaatccgtaaaatacagtggctatcatagcaatagcattcaaatggatagccattacatgatttcgcgcgaaggtacggttagcccgaagcaccttcgacccatcggagtcagcatcggtgctctcgcttcctgcatggtgaatttatgttagtcgtataatcaagtttggcgcttcacgaagaacctaccctgtagcgccctcctgaccaacatcgcagtggtcgtccgaggtccatggacgaaccaattcagacatcccgtcaaagcaattaaacaaagagaagctacgccccatggatctttgaccaatgacaaaatgctgtatggtgggtatgttgctgccgtcaacactgtgagtccgacctgggttccgaagtagatggggaaaaggcgcttttggaggataatgaactccttcattggtaaaacttggtagcaaatttttgtattgataaagctctagacatggtgagtcatgagatttcttgtttcttcaggggacaagagacgtacctgatagagctcagtcccgaggagagagccataagagagaagatggtatgggagaaggctgcccactgtcctgcgaaaagagtccattctatcaagctactctgatagaaaagcttgtggtgactggaggagggaagatagcagagtcggagacagtggtagtactatttggctggcctagccgccgacagaatccttgacgtactggctgagatgtcgaccaacaaagtcaaggttgatgaattgatgaacaatggttttagttgtctatgcttggacagccgcccttagttgtagtctcattatgcaaatattgccttattttgtatatattctactatcatgtgaatgccatgctgtattgctttatattacacatatggagggctgcacggatttatttatatcctagactcataatacagacggagcatacaaaccacttgcgggataacaattctctgcatcacgcagttacacagagagatttgctttccagaatccaatccaacaataaaccgaactggatcttccgccagttcctacggctagatctcacatgcatatatccagggagcatgaagcatgaatgagcgatcacagtggcaccacacagcagtgccccatgttcacgaaagaagttcattgacactctgagctgttggaccgagaatgggaaatcagcccgtctatgacgccactgcatgaatgactccttagggaggtgctcgtcgccatatcctcggactttcaaaccaattgacattaccaagaaggtaatgtgacctttccaaaccccagagtaagaaaatatataagaaaactggcagtttggatcaaacccggagtatatccagcgtgagctcattgttcttgcagcattgagggggccaatacacgacgtgtcttatttttagacttcagattgaacgttgcactagctgtacttccctcgcaactggtagcttgtcaccatagcctgaactccctgtcttctgtgaactgttggccgctgtcggcctataggaaatcgtctctctgattaaataccaatttgaacatcagacaatggcaattaccattgccatgtgggccatgtaatcgggtcgtatataaaagctgaattcggagatgtccgaatctacaagaagatgctttgacgacaacgtgtaatttaaagtataagtaggcgggatacttatccaaagtaccgggggcacgtaggttaccactgagggaatggtaagacggttttgccacgtcaaggagtctaaaactagtctggtgggctctgacaagcgagtcttcgagccagtgagatgggttagagctgagagtttcatgggctgtggcgaatcccaagccactagaaccaaggaatgaaagaattcagggcagcaccatgtccatgcacatgcccatgccgaggatagcctcttattacaccccctcgtgcgaccatcatgaaaccttctccaagaatgcgcgagtcggcacaggagccttttctgcaaagggttggcaagctgagaaaggcaggtattttgacatagtcaggtaaaacagcatcacgaggctgaaaaggcggaggttgaaccagtggctttcagaccgaatcactgattacagaagatccgttgtacaagttgcgtcacacagtgagatcaggcgtgactttccctcgtgggcgcacggcctgtataaagccaagggaggctgacggcgaggggccttttccctctgagttcctgtgctggatatcaactcggagcctctgctgacgagatttatatgagatatgcaacatccccgagcccgaaaatatccctcaagaccataagaccgtaaaaaaacaattctttacaagataaagatggaagatcagtctatgagtcccaaggatgatattctcagccaaacacaagatccactggagagaaggagactgcaaaaccgcctttcccaaagaaaccaccgtaggatattgccccaaacagagacgacgggttggaaactgacagagcctaggtcgcaagattagggaacgcattgcaaagcttcaagatcgcgtcatcgccaacgaactgagagctgcagctgctctaaacggatgggatcaggtatataatccttcgctgttcccgaggtctcattcctcttactcggagactgagcccgtctttacctcgcgcggtgtctgtgtctcccctttaatcccagaccaatgtacctcattcatgccgtcatatccaccgttctcgcaatcatggccaaacgacctcaacacattcccacaacaggcgtaccctggcgacctatcccaatttactggagtcagtgaagcaagtccaatatgtcccataacaagggctccagtacagctgaaccatatcacatcaccacccagctctggtatcagtggggagacataccgggaaatgataagtacaccggagacgttagtaccagactctttgtctacagcagcacccaatcagccgctgtactacgttgcaactggtcagtactccaactgcacggtatatgagttattatctgagccaagaaactgataaaaagtagaacaggcattaccacaaattatccaggtcatcaacaccatgtctccccaatacaaagtgattgttttggttcccccagagtctccggcatcggcgtctatggctgtattcccttctccaaattattcatatggttctggtcataccgggccaaataatggtcctgcagcacagcagtctgactcccagagcctgggttgtctgtgttatcctcaaaatatacaccctgggccgcctgcgtactccgcttcaaaatcatggatgggcggggggtcatatttgcaagcttgtccattacacaagatggcaaattcagttaccccggggggagcgtttcctgttaggatgatatgagtctgtgtggcggtgtataaagatagaagtggtagagcaggggccgatagtgggatatatacaaagaatgggaatggataaattgtgaatagctagatttaccgacagtgaaagcttatggagtgtatcccgtataatagtggtccggaatatataagttgactatatgaatgaggatacttcgaggtagacttaccaccctaactggattgaatacggaagacacttccaatgaacataatgaggtaatagtagagttaataaaaacggtctttatcttcatagttccacgcaactggccagatcaaatggcaaaagagaagaattaaaggttaaccgaccaagtacggaattccacagacacagactcgaaatctattggatattgtattgaagacttgtgtaattgcttcagaatactctatatctttgcaccaaatataagccaaacatgagagcaagaaaacgagtgaccatggacagaaaagaataacagagcacacaatattgaaagcaaagacacataggaaattctcagtcacagtgaattcgccacagctcccgatcacagttactgatatatccagtgcgagtatgcagcatggcagtattatcactaatcagcagatcacccttctcccaaccaaagcgaagacaaactctatagtcatatgtgatgcgatccacaacctgagctagatcattatcgtcattctcaattgaaacctcacaggtcgagaatttggtcttggttgagtcccatggctgatgccaacgcagacacggaagaccagagatagggtgcttgacgatcaacggcaaattcttgagttttgcattccagaacccatcgttgtccatagcccaggtaatcttttcgagacgttcggcagaccatgggagaggtaggtaccggaaaaacaaccgggagctcgcaaacaaggtatacccattgccctttggcgcagtagcaggacaagtgaagaactgatagcccggtgggtgttggactttcttcatctcgcctgtttctgggtcggtaatctcgtcgaacttgaacatcccatcaaaatgcattggcatagcctcgttcgaggtcacattgttgcccattttgtcagagcggccgttgtcccgtactttttggattatgccaaagctccacgggagaatagtacccagctcttctcccttttggacgtagagatcttcttctagagtctcggaaaatccacgtaggacaatcggggacatgccattcgacagctggcggacctttctcatggggatggagcggattgacggtggaggattgacattgtcgatatcggcggggcggatgatgagtccgcagggatagagatgctcgaacttgacagataagccgtcctcggtccagtcaaagagactcgacctttcacggaagaaatatggttgtccgtttttatagataaggtcgtgcgtgtcgcgtacatcttcagcgtgaaccatgcggtataaaccatccagtccgacagccacaacagagtgccaaggcgtatgacccagtgttcctcgcatctgtggaacaagcgagatagaaagctttttctcgcctgcagactcgtggatagacagtcgtacgtaatctttgcggttggctttgatggccgccgcgaacatcttgccccgaatgatcatctgccgtgcggtctcggcaatatgcgcttgccgagcgcgttttgacatcgatttatccttctcctctagatgagccagatctttggttagaaatttaatgtagccccggtatgttaggcatgtatcattgtcggttttgatcgcctccgtcgcatcgaagctcgggtcagcaaaggtgtacatcagttctcggcggagacaactagcgtgggccaaatagaatgcctttgcggactccggagttgaggatgggaaccatggatgctcgagaagttcgaaaaggcgaataaatttgacatgatggagctctttttcgacggccatttttcgcagggcctccccataatcccaaacggtttcatcggggacgctcaggagatctaacacatgtcagtattccagctaggaaaatcatctcgattgtgttctttaccattgtataccagcccatccgaactgatgtagatatcggcaccaggggcgtatactgcaccgatattttggcaaagtccattcaaatgggccaatgccaattcttccccaaagtcgggcatagtacccagcaccttactgcgcgcattaggcgacttgaaaggaaatgcgggcaatatcatgcggatgggctcttgtctggcgatttgctccaggacaattggaacgaacgactcaaagcccttccaggagataccggccttctcaaagtcgacaccatagctttcgatgatcttcaatacctccatagctatcgatttattttccgataaagtattcgagatttcagaggtgaatccattgacattttgttgagtaccattgccgtttgaggcaatggtcaccggatcggcactgttatattgaggcgtcatctccacagtctgcatcttgactttctgattggacattccattgccgaagaacgggattccattctcagcgagcttagggtggtatgtagtgggaaccatttccgcacccggtgccaaggcgaccattgtggctcgatgtggaatgtatgtttccaagggagatactctgagccaggcactgatctacccagaaaaattatgagacaaaagcttgattagaaggtaactgtattggtctcacttgagtcctgaggaaatagataagatgtgttgttttacctagaaccagatggtgctatataacctgcatcggctaaaacagcaccagctagataactgacctcgagacaggaccgttccgatgactgtaactcctaatgcggaccaacaggtcaagtcttaggttcaacctagggcatcccagacaggaatggccatcaccctgtacaacttggggcctttacttctctacttcatcccatgaatgaggtaattgtggagggaattcgctaaaaagccttggccaatttggtaaaaggcttgaagttagattcggtagatcgaatgctgagtctgagaagcttaaatccaaaaagcttcactcaaccgttcagtgttgttagcaaagatcatgtagaaccaaagaatgaggtggttggaaggatattcccagcgtaaatgagaaaagcctcaattatacatggtgtccaatgactcgcaatgcatccaagtttcaaatttattggacagagctaagcacacgtgttgtgacacctctgctgtgttccgattccacgctgctacttgattcacaagatagtgttcgcgaaacctgcagctcactctttgagctcacgccaatcatacttcataacccgagtaacaaatgcagccatgtcatgtgttgtcaattgactaacaaggtagcatgtggcgtctaagcctgagccgacccctccggccgtgatgagtcgaacaccgtctcattcaacagacccccatcaatgtatcgcctgtgcagtacagtagtagtatgatcccccggagcattgaactgggcacaaatatctcgaagtctgtcaagagcatgatggtgggttgtaacagtcattccgccgagtatacccgcagccccgagcagaaaggcgcccgtgcaaatcgacagcaaaatcctggtgcctgataacaaagcaacaggtagcgctacaaacttgcgaatcaaatcaagctctggtgtgctgttttctagcaatggctgcaaaactgacgggggaccacctgggatgactaggatatgaaagtcggaaattcgatcgaccgcgtctggcaaaagcaggtctgcatgaaccgtaagcaaatttgcagcacgaatcgtggggctgcaagccacagttgtgatttcgaacattcttttggggttttctgggtttcggttgtgcgagacatgggataggacttcgatcgggcctgcaaaatcgaggatgtctgcgccaggaaacaggaggaccccgactttgtagtacttgttggaagatctaagagacataattgccacgacaaattgcaatttggtcttgcaagacgtaccgatgtagacgtttttttggcggaagcgtgggaaggataaataacagcagtagtgagattctcagagctgattctgggatttcgcttgaaagagattagaaaggctgaagtgcattttacctcaaagcgtttctgactctgctgactccgaaaacaactgctcgactttgtccaacccgggtctccgcattcaccgattcgacgcttggagattcttgcaagatgtccatgcgcttggaaacgaggctgtctcatagccagtactcttcttggtgtcagcagctattggtttaagtgctcgtagatggatcctagtcttctagccacatcttcaaccagtcttggtatatgcctagatcctggagtgccagtgtgccagcacctccctgcgcgacgcaacgacttcagggagagttcatcgccatcattgaactttcctggactcataagtactattgggagtagcatttggaataaacaaaaagtgaccagaaataatataaaacccaattgattcagaagtcataaccataactattgttgtaggggattgatactcctgcctggatttccagtaccgcctttctaattaggtacgatcaatttcaatgcatctgctatgggggagaccatgattaattaccctagggatgtgggctcactctactccgtacagctcctcgctgaatggagaatggtggagtgaaatgtaaatctgaagtagagaagagaagaaaaagagggccttttattacaagctcattcttgaatatcgctgtggcgattaactacttttcgctgacgaaaactaaccagagaaggaagcaattctactccgagccttatggaaagggaaagactctgtctttgcataatcctcggtctacagaaagcgtattagatccaaagtatcgcgatttaagattctgtaagagagattatacacatactatatgttcaacgacggatatcacactgcagaaaccctcaactcgtaagaacagcctcccctgcaataattgaaggaaaaaagtttgcaaaaaaaaaaaaacgacaatcatgagttgaaccgaaaagagactccggcgccgcgctgaagaaaaaacaactgaaaactaaacgcttttcgcctccaatcactagccccacaggggtggatgaatatactccgctgcgcgatccagtatgttgggcattgtccattcaccgctagcggagctttctggcgtagggggcggaagggaaccaacgctgggagtcatgttcgcctgcccaggaccatatgcccccatggaagcggaagtcgggttgaggttaggattattggagtaaacgggcgtaccattgcgtcccattgaacgcgtagatgggtttccaagtgcggcaagaagtttttgcaaagcacgatgtgttttcgctagtgacttggcccattgcgtttgtggatcgggggggatcccaaccggagaatttggatccaccgggatgggacctgtgaggttcctgacgcccgtgattgggtcgtaagtcccgagtgcttggggcggcgatgtcatactggccacagtttgggcctcgttggaatcataggcacgttccgtgcttgctctttgggcgatgatgccctcgagtgagtagagaagattccacacattcgggtccgctttcgcctcatcgatgacagcaagcaggaatgcggaactaatcgcccgctgcaataggatccaggaacgagctgcgtgggagctgatgttgtgcatttcgatgtaagcttcaacggtcgtcatcagattcataatgcatttttcgcgcatgctggctgcgttggcgtggctcaagtcagccatgggtttgagcgctggccggcagagctcagaggcgaaataagaagcatgcagttttaacacaacgcgctccaggtgctgcgtaggcgtggaacagtccattgcctctcgcaggtatggctttgcctctaccatgatcttctggatgcggtccttatatgtttgtatgctttccaagcttatctgcgagtgcgggctcaacatgcgaatgcggacaacctctagtgcaagagaaatgacacgagagagactttcgaaataggataaatcgccaggtttggagccatccctataagcaatatctggctggctcactgcagtggtggaaggccggtcgtaggagagcgaaaaatggctgtcttgccatgccatggaccacctattcatgtcagggccacatactttcgggctacgaacgaaaaattatcttaccaaacatgtcgtcggcggtatcgttcagctgacgagaagcgactcgactccacatggagaccgagcgccaagcccatgcgaagtgtcatgccgagcaagacataagaaattccaggattcatgttgtatgacaaaacgtttcctatcactaggagagtttgaattgcctgaatggtgggttgggagaggaaatttgtcatgcggaggcactggtaagagcagcaaactattcaaagtgttagccaacgactccaataagaatttcggtgtaggtcgcataccataaacctgagaggttaattccctttccttgctcccatagtcggatgactggcacccagaggcaaggatagcgaacagtagtcctaggtacgcaatgcttaccccgaaaggcttctgtgcttgatctgcatcggctaggtactcgccacccatggaagctcttgttcccagcaggagctcgagtgtgttctcaaactcaaagatgtcctctaaaacagggtatatggctcctgaaatatctttgtagtagtagaataatctacaagaaagcaaagttagcccaaccaatctcaatcaaggggttcaatttaagaaggctactcactctctgcactgttgatcagtgggaagggcgctgcagacggcggtaatatcgaatgttgacatatcggaggaccatagatcaacaaatggatatgtcgcagactcattgtccaaaccaagcttgggcagtattcctccttccaaaagtgcctgaagttgatcagacccagactgattgtttaagatataagccataacagagcgagatcccaaatgaaccgtgcctttgccaagagtattggcagcatggatgccctcgcgttccggcgaggcacacttggaacgggaactcgcatcgccactatgcacgcttccggtttccatggaggctgggaggccgtcttccgccctctctaacccgactcgaagggaggaaatagtagactccatttcctgcaacctattgcgcacattatcccattcctcgcgggcgattgatatacggccaccacctgtggcagggacactcggtcggcttaaggttggctcgtgtttcacttccgctggggtttcatcgaacgcatacgatgctgaatattcatgcacgggtgccgttgacccactagggacagcgctatcatggaaggcttgcgatcgcttcttggaagggcgttcgtaggagcaaaggtctgcatggtcgcgcttaacgcacccgtcacacggcagattgcgatcgcatttaaccttgcgcgcatggcaggggtagcaggcttttggctcgcgagccttgcgcttcgtgcggatgatagcgtctacctgagactgcggcaaatcggagacccctcggttggacgcagcagccatgtcggacgcaacggagggcgagaatgaatttgatgttgggtaaggagacgtcattctggctcaaaaaaaaaagacttcggtacaatatatcaggcgatcttgtgaagttgtcgttgtcgttgtcggcctttacagcggtgtttcatccggtcattggcagcatgggggtggaggatcagaagcggtttgcgagttggaaagcgagttcaatacattaggcaggtacagttccataagttcatcagttaaaccagagcagcatgttaggcaatgagggctcgatttgaaattgcacacgatttgttcaagggacctgggattaagcgccgggaccatgctagaacggcacgtgatgtggggcgtccaaatggggaatcaagccctacgtcagtatggtatgcccttgaaaccttcctagtctcgttataatttgtaaagggcgtaggaagttggcagtggatatctattgtgtattgcttctagaacttgcttaagaagaatgattgcttttgatggcaatgtagtcttgtaactcgcaccgatgcttcaggctgttccatttcatggtctcgatcgacacagaccaggaaatctcaggccatttattgtgaaaagaacaattccatgtgtaatattatggcttgaagtgcttattggataatgatgtcgttacaatgccctcgaaaaccacgtagacgggcaattttccactggggaaaagttaaaaaagccccaaagtggtggctatgcactccagtctgaggcagtccaaaccttggaatgccatttttttttactatggcgatacgaaactaaatggcatttataataaggagtgccaagggagacttcccctaaatggattagaccactgcgccaacagggtttgccctaacaaagagtatggatttgactacggagtatgctgtagtgtacatgtcgggatgtatcctagaaaacaatgacagtatcagcgggcatagactgcatctgtagttagcatgacaccatgacttcaatattagcacgtttggtaaagcgtacttgtcctaggtacagtctgtagtgccgatttagatgatttagatgatttagatggtatttcgaaaagtgcttgcaccggtatctcaatatttgaacgttacttgctgttcaacgtactctgcggtttgctgctgattatttgcttcgaaaaagcacagaaagaaacagcatttttctactgcggaaaacgaacggcacattgtcccgtctaataaactatattgaactcgtctttaatgcgatcggcagacgataatttattatgggtcctgtatatacgcggggagacttcctccatatatgattggtctgttgtgaatatcctgtgagatgactccttaacggtgcgaggatatcgatttattatacggggtaccccatactatgtggcccttcccagaggatttgcaggctctttagtaaaaccatcacttaaggagaaccccctaggcgatctgagtatttcgaccataccacacgcttattctccaatgtattattggtctgttagggtgttctagaatgcttggctaatcgtgccaagcgtccaacccaccttgatttctgctgtgttgacgatcttcggggatgcaaaagcgggttaccccgacgattataaaagtgaataagaacacgccattctccttcttgtatctagttgaaattttaaaaaataacaaatgagtatgagagtatgaaagaacgctgaaataacaataaccttttgtcctatgatgccgcccggggcatctttcgatgtaagacgagtctaggtacttgcaatccacatcgtgtcattgtcgcacggggctgacgctgtatatagcatgtgccgtagccatgggccatccaatctatgatctgctttgccacactaacctcgatatacctcatattgcactttgaccaatattgtcatccgcattcgcttattatccagtatagtaacttcaacttcaaccactggaatagtcatgatgctaccgtcagccgtacttgacaagtgttgccctatgactgtgggttctccggtcgatgttctcatcatatttagaggatcactctcatatcctgacatcatgcttgccccagtgtcatatagaagtccgcataccacctgctatcagggatacgaatagcaatcttatactaagaagaaatcaggattgatcaaacgagaattgttggggatataaagtgcgaataaagtatccatcgggtgggagcattccatccagactaatggccgctgatgaatacgtaggaccgggtccaaccagctatttgtgaacctctcgtatcattacgagtctataaaacgaacttccagggaaagtcactcctgccatctataagtgtcttgcttatagctcaaataccttcgggtcttcgcgtcaggggtgagggggcaagggactatacaaagagaaatagatgtacatagtagcattgaaacggttgttactgtcatttccacttggtcaattggggtatatcaaagaaagcgttcagagttcgaggtagcccaaggagtatgccttcgcagcatacaagacacttactttggcagatctatgcctcgggttctttatattgaatctttgtgaaagcgttggcgagtgagtacaaggaaatggaacttgtttgaacgatctgacattgatacataccattttggttcatcttggcatgcagtttgctgatcgatcttcctttgtcttgagtcaatactcatttcttgtttttgcttgtgtaaattgtgatattttgccaaaaaaaacttgcaattgtaagtagtctgtgtatgatattagaaatgcagtagatggtcataaaagcaagcttgaaaattaatggcagcagccattgtctgatgttcactagggtgagaaaaccatctataacatcatgatgatcgatcccttgaagctagttcaggccctatcatctccacggagaccagggcgatggctgagtcgtgtggtacaaggtcaacgaatgatttttcacactaaatgagtggaagctgcacgacaagtcgaacggtttaagatgcgtccaagttcctcagctttcattttattaatttcgctagttcatgtgtcgacattcgacaaaagatgtggcggcctgaggcgccatgaacgggacggaatatctatatcccggctgaccaattgagagaagtgacgtaccggccagctgccagcgttgtttaggtctgtcacctaactcagcttcattgacactgacattgtttttttccttccgtccacctgagacgaagcacctgttgtcgctatcaaatctgatcttgattcctctcccaatatcttctttcagcttcgatcaccgtaacccgctaacgaagctcaaccatggagggcaaccccgcggagcacgatgaggctgtgtctcaattctgtgctatgactggaactgaggcttcagaggtaagcttcttgctgtgtctatacataacttagtcgctgattttgagtgcgtgattgtctaggctcaggaatatcttgttgccaatggttgggacatcgaagctgctgttacggaattcttcgcggagcaggacgaagcttcacaggatgccggtgctggtggtgcgcgaccactaggcacagagggtagctctggagcttccgcggggggtagaactctcggcggaagtgccgtaccagcttcatcctctgccgcagctgggtcctcatcatccgcccgaagcgctgcgcccaagaagaagtttgctacattgggagactttgcttcggggggaggtggcggcggtggtgattcttccgatgacgatgacaccgacgaacatgatttcttcgcgggtggtgaaaagtccggactagctgtgcagaaccccgatgatttgaaaaagaagatcctcgaaaaggcccgcaggtactttctcctagagatgctacgaatgttgaactcaactaacattcgaatgtcaacagggcgcagcctcctccttcagacaccccggcgccaagggaatcacatttcactggcactgcccgcacactcggtggtgacgatgcaccaagtcaggtgattgaaaacccatcggcgcctagtcaacagcgtgcccagcgtgttcaacggactcttcatttctgggccgatggattttcggttgatgacggtgaactgtttcgatcagacgacccccgcaatgcagagatcctggacggtatccgccaaggccgcgctcctctttccatcatgaatgttcaacctgggcaggaggttgacgtggaactcaagcagcatgaggagaagtacaccaagcccaagcccaagtacaagcctttttcgggctctggacagcgcctcggaagcccgacacccggcgtacggagccaggcgccaacaccctcctcttctacggctagaccatctactcgggagccaacgaagcccaacgtggacgagtcacaacctacagttaccctacaaatccgcctaggcgacgggactcgcttaacgtctcgattcaacacgaccgctaccattggcgaagtttatgcgttcgttgcttctgcgaccccggatggtccaaaccgcgcatgggtcttgatgacgactttccccagcacggagctcaatgactgggctgccgttctcggcgacattcctgatttcaaacgtggaggcgtcgtgatccagaagtggctgtaaatgcactattaatattctctttcgtcttcagagtggttcaaaaagcgaataccagctgggcagtggggtttgtatggatgaacgttacatgacatatctgataccgaagagggaccttcagatttgctacgtagatcaatggaatatcatttaatgacctccaaattcaaaataagtggttaaatcgacctttcatatcccatactagtgcgtccacgttgtagaccgaaggttagtcagaaggcgattgataagcgcccgaatatcggcctccgcccttgaaatccgtcgttgagctttcagttgctgcaacatttcttttctccaaattaaacatacaatatacaactatgcctctcactggggtgaagaatgtcgtgctggtacgtgcaccttcaatcccttgccagtcctgccagcgcgaaaaaaagaaagcccatgcccctcatagcttatcgataacgagagctgctcgaagccatgggctagacacccaagcgcaatttcttagacaaaactaacaagaaacgattggaatttagatcctttccggcaaaggaggtgtgggcaaatcctccgtcacacttcaactcgccctcgcgctctcgctacaaggaaaatctgtcggcatccttgacatcgacctgacaggaccctcaatgccacgcctagtcggactcgaagatgcaaagatcacacaagcgccaggcggatggatgccagtaccagttcacggagctgaatctgcagctgagcccgacgcctcagcaccctcaacacaacccccacgcggttccctccgctgcatgtccctaggcttcctcctccgcgatcgcggcgacgccgtaatctggcgcggaccaaagaaaacagctatgattcgccaattcctctcggatgtcttttggggcccgactgattacctactcatcgatacgcctcccgggacgagtgacgagcacattgcgctagcagagcagctgctcacactctccaccacagacgtagcggcggctgcgcaaacaggcttgcctagacttgctggtgcggtccttgttacaacgccacaggctgtggcgacctcggacgtgcgcaaagaagcgaacttttgcgttaagactaatatccctgtgcttggagttatagagaatatgtctgggtatgcttgcccctgctgtggggaggttagtaatctgttctcgagtgggggaggacaggtgatggcccaggaattaagccttccatttatgggcagcgtgcctatagatgtgaaattcggagaattggttgaaggaaagatggaggcaggggatagtgatgatgaggaggaggaggacgagagtccaaggactcaaccacaagatagtcccgccgagcctgatgatcgaccgctcgttgaacgttaccgggatacctggtcttatcctcgatttgagggatttgcgcagactcttataagggatattgagtgcccgaatgctgtgtagcagtgttcgtcgtgaaaaaattgtgtttgattgcttgttttctagcgacatatcttccttctcctatttgcattgcgtcatagaaggtgttggcaatctctgaatgtcaaatcattcaattataaagtctacacccggagctcgagtaggtagtgtatggtgtatgtaatcttcttgcaagataactatggtattttccctgatacctaagtcccaaatcgccaagcttcttaatcccgttcacttcctgtcaagaagcgagaccgccgttaatgccggtttatttacgtgtgcctctgccgaaagtagataggcccactaagccaaggtgaaagtggctttaaattagcaaaagatagaacgtaagggagcgtattgaaatatatataaactcccacatggtactctagcacatgggcttcaccatttcctttggacttgttctagatcctaactcacggtaccgtagtgaaaagtctttccgaaaactatatggccgcacagctgcccagaaattagcaacacatgccaagggtcgtatgcgccctccgccgaaaaacccagacttccaagtcctcggcgccgaggctgaactcacgtcaagctctattaaacgtgcaatcacagatcagcacccaggaacgtgcaaatttacccaatatgactggccaaagtgatctgtagagagtatatcatcgccggaagacgtccttcgtccgctcttggcgtccgctcccaaggcttggcgccaactgccactcttattcggccatcgacaaagtcgccttgtacttagccaataactgtcattgatctctttatgatgggctaatactgacatcagaatggagctccatacggtttaggccaagttcaggaaaatattttatcacaggacgcacgcacttggcaatggtcgtggcgagtttgcagctcttataagggcaccatgaaagcagggccgtagaagactgctaaaatcaattccttttctagttcttcaaatttctcttcttctgtgatccaccgcagcccctcgtcgctatggtatcggtaataaccgcgaagtatgactggattctagcccttaccaccatcgctttcgttttcagtgccttcggcaatggtgccaacgatgtcgccaacgcctatgccacttcaattgcagcccagacgctcagcatggccacggccggtgtcctggctatattcaccgagtttattggcgcagtagccatgggcaaacgagtcaccgatacaatcaagaacggcatcatcgatatcaagcgctttgacgacaagcctggtgcgctcatgttggccatgggctgtgccgaggttggcagcgcttcgtggttgatgttcgccactcggatgggctggcctgtctcgaccacgcagactatcgtcggtgccctcattggtgttggttttgcgagcgaggcttctatcaactggggctggacaaagggcagtgtctcccaggttgccgcatcttggggtattgcccctctcgtgtcaggtgccttctcggctataatcttcggtactctgaagtacagcgtccttgaacgtcaagattccttcaaatgcggcatgcgtatgattccagtctatcttgccttgacaggagccatcctcgccctcttcatcgtcatcgaagcccccacggcaccctcattggaagagtttggtgctggcaaggcagccggcatcattgtgggtgtgttttttggctgtctcatcattgcatatgtcttcttcaggccatacttcatccgccgtctcgtccgaaacgatccccgtatcaggttctatcacatccctctcggccccctactgctgagggaaaacccaccgctatactttccaggaaagggcgatgaggccgtgattagctactatgaagatgcttacgggcaagtgcgagccggtcagaaagacgcagacaaagaaaacgtcacattgaatgcagactctgtcatgcccacgccggagattacagcaatgtccagtccggcccacataggggatgatgaggagaaggttacaccggaacctaagccacagaaaaagcacctcgaaccaacggagcggttcatcgaccctgtccgacacctatcctggacaaatcccctgaaggctctcggttatatcaaatggcttttgcttcagggcgtgacgcgtgatgtgattacacacgactcccctgaactacgagcgatccacgcacgtgctcaccggtatgacgaccgcgttgaacatctctggacatactgccaggtggtgtcggcgatgatgatgtcaattgcacacggctcgaatgatgtggccaatgccgttgggccatgggctgctgtgtatggcacgttccatgccggatatgtcgagaccaaggcacccacccctatctggttcttggttattgctggtctgctactcggtcttggattctggttttacgggtaccatatagttcgtgctctgggaaacaagatcacgcagatgtcgccgacgcgtggattcagtgttgagcttggagcagccatcaccgtgatgttggcttcaaggcttgccttgcctgtttccacgacgcagtgcttgaccgggtccgccatgggcgttgctctcatgaactatgatcttggtgctgtcaattggaagcagcttgtctttatttttggtggttgggtcttgactttgccttgtgcaggattggtttcgggactgatttgtttgatggcgttgaatgctcctcatttgtagtagtagacagatagctacctgtcatttttagttttctatcccatcctagcttattattaagctgataaactgaatctaaaaataaaaataaaataaatgcaagtatatccgagaaagaaaagacgattcatcgccggacatattcaggtttgtgcataggcgttatataattaaatcgtcacgatccagtcgaacggcgggtatccttctaaacacacaacggaggatgaccctctatttggtccgcttgtaaatcttgccgaggaaggcctcgaagacttccttcttcagacccttagactcatcgacggccgcaatcttctcgtgcagctcgccaacaaccttctcctcgtactctttgtataccttctccaattgtagttcgttgaaaagggccttgaccttggcctcctcagcagcgtccttgcggccgtaggaagcatccaggagctgacgctgctcgggagtgcagcgctggatggcctggttaacgagccaagagcacttgttgtcctggatatcggtaccgatcttgccaatgacagatgggtcaccgaagttgtcaaggtagtcatcctggatctggaagtattgccccagaggaatgaggatgtcgtgggcctgcttgagattttcctcggaagccagctgcaggtacataagagccaaagcgacaggtaggtagaagctgtagtaagctgtcttataggtgacaatgaacatgtacttctccatggagaagttgtcgaggttgacgttgtcctcgggggcggtgatgaggtcacaaagctgacccagttcagtctgccacgtggtctcgtggaagagctcgacgatgtcaatgtaggcgggatgcgagcggaagcgctgcttaaggatgaggtagatacccgcctccagcatgaaggagtcgttgatagcgatcaagccgacaccctcgtggcggtaccagcagggctggccacggcgggtaatagaggagtccatcatgtcgtcactgaccaagaagaaagcctggagtaactcagtcatccaacccaggatgctgaggtgctcgaattgctcctcggtcaggggctgcttcaggagagcacgaccggtatcagggaccgagaggccacgattgagcttaccgccaggaacattgatattaagagactagagcgcataagatggtgtcagctatgatctttctttcctcaagaataggcatcacgaggttttacttgccttctcgaaccactcgagcgcattgtcagggaggttgtagcgctttgcgtgggcaaggatatcctgggccagtgaagggaaaatagcctcgaagtcggcgcgcttggtagtagagcccatgatgacgaagtgtgtggtaaaagatgacaatgatctgacaagaaggacgaaaacattcccacttccccgcagttgtttggtttgtttggtttgtttggtttgtccggtttgctctcgttactgtttctccaggcgcaacccgaggacgacgtggatttctcaaggccattgaacgatcttcgcgttgtttcagaatctacaagcattcatagctttcccaggactcttgatacacttattgttctttccggttacgcgagttgccgtctcacctgtatcaagaacgcgacgagggccgagaccatttatttacaccggacatttgaaagtaaggattgaaccgctacgtggtgggctttctaccaaaataaggatgagattaaattgtcgcaaaacgggttgataaactgaaagctccatcggcgctacaagactgtctttgaacgttttgcctcggaacacctacctgcgacgaagacgcccgtcatggaagaacctacggatgatggaatccgagagctcatgtaccagctggaaaatgctgcaatcaagtgctctgagcgatgcctttatcaatcatcaaaatggtaacaataataagcttcattcgaacaggcctcacgtgctaatgatgttcatggactcagggccgctgaaatgcttgattccctccggcctttagatcacgaagacactgacctcgagtcaccgatggatatttcagaccctccgccagcaacaaacccttatctcaaagtgcgcgacccagttgaagctgcccttgaaacgcaagagtcctacaaatacctgctggccaaatcttatttcgatactcgtgaatatgaccgatgtgcggccgtattcctccctccgaccacaccaccagttcctttgtcaattacctctcccaactccaagccgaggccatcgcggacttcacacaagggcaaggacaaagcttcaccgtttcaaagctcaaagacccaaaagacccaaatacagcaaaatccatatccaaaaatcagtcagaaatcgctcttcctcgccctgtacgcgaagtatttagcaggagagaagcgcaaggaagaggaaactgagatggtattaggtccagcagatggtgggatggcggtcaatcgagagttgtcaggtctcgctagaggcttagatgggtggctatcggaacgaaccgcacagggtttagatgaccaggggcagggatggttggagtatctctacgctgttgtcttgttaaaaggacgcaatgaggagctggcgaagaaatggctgatccgctgtgtgcatcaaaacccataccactggggtgcttggcaggaactgaacgacctcttgggcagcacggaagacgtaagttattgcattgagattctcttccgtctgtactaatttcaacagttgaaacaaatcctcgaacttctgccgcaaaacgtcatgagcttaatattctacgtctactgcagccaagagctgtaccaggccacagaagacacatatcggtcgctctccgagctacagtcaatgttcccagaaagcgcattcctcaaaacacagcacgcattgttgctatatcactcgaaaggtaactaccccggctctgcaacacgcgattactccgtgatctaatatcattcagacttcgaagaagcatctcatatctttgaaggcattcttgccacatcacctcaccgcttagacagtctagatcactactcgaacatcctttacgtgatggaccagcgacctcaacttgcgttcgtcgctcaggttgcaacggccaccgacaaattccgcccagaaacctgctgtgtcgtgggtaactactattccttgaaatccgagcatgagaaggcagtaatgtacttccggcgtgcactcacccttgaccggaacttcttatctgcctggaccctcatgggacatgaatacatcgagatgaagaatactcacaccgccattgagtcataccgtcgagccgtcgatgtcaatcgcaaagattaccgcgcctggtacggtctaggacaggcctatgaagtcttagatatgtctttctacgccctgttttactaccagcgcgctgcagcattacgtccgtacgatccaaagatgtggcaagcagtcggatcgtgctacgcaaagatgggccgagtggaacagagtattcaagctctgaagcgtgcattggtggctggatcattacagccagatgatggcgggcaatcggccactggcgcaagcgctggctctgggagtcgcaagatccttgacccagaaaccctacaccaaatcgcgacactgtacgagcgtctcggtgacgaagaggaggccgctgcatacatggaactcactcttcagcaggagtccggcgctcctgtcaatgaaaacgcagacgatgacgacacctctgtctcggagcatggcattcaaagcgatgccgagattgagcattcaggagacgaagacactgatcagtcgcaacgacatcgccgtaatcggaagcctcgcgcgaaggctgaatcactcgctatgcagaacgatgactccattgtcagtgatacctggaacggcaccggcgttacaacaactacgtccaaggcacggttgtggttggcacaatatgcgtcacggaacggtgatcttgaccgtgcagaccagctagcgagcgagttgtgtcaggatggaattgaagtggaggaggccaaggcgttgatgagggacgtacgggcgagaagggaggatgcgacctaattacattgattgaatgaaatatgtatggattatcatgacagcgaaacagccatggatttgacaagtctttatgaataatagctagaagcaaagtctgtctctgtatgaatagtcttcaggtgtggtataattgtcattcgtagaaagaaaaggggtattaattatataagatatgagccagaggtttaatcgagatatactcgcccaacacagcaatagccgtttcatcgaagctcatctcaatccatggcgtccttggtccagagaccgccgagaccggaggctctgttgtctctgtcatatcataacaatagcgatccgaatcagagcggagttcccctcttccggtggatatatcttcagaacgcttgctgagactccatgagagacagccgtagaaataatcgcgtccaatatctgtccaagtatcacgcaggcagaaacgaaggtcatctgggcgtagatcacattccaacatgctcgagcccagaaaaaatatgcttcccatggaaggcagtggacatattccagtatcaacgaaaatggaaagagtcttggcaagacggtgcatctctttccctagttgagttgctatgggatcaaacaggacaatgccaaacctggacccttgcgatgcggtataagggttggacgtttgaagggaagaagcagattcatcagagcagagacaccgaacaaattcatccaaatcgcgatcattgctgggcttttcatacatctgcgggagtgtaaaacttcccagtgatgttcccggcgtccatatggggatagttgtaaaaggagattggggtggcatcttgcgtttctgcttgggcgatgtaggcaccaaaagcttgcccgaaaggggttcctgcgccccgtataatttttgagagtgttctttgcgtgcagaaatgaatttggttgcccatatgggacgtgaaaagctcgaagattcctgccatgcgatctttccatccttctggctacgatgttgacgagatgatagattttcattgtccacgagtataatgctctcaagaacagagttctcctcttccgtgggaagtgtcgtctcatcgatgtagactaaggggggcaggggatgatcatggctgtcttttatcattgaatcttcaaccagcccttctaccaatgcactcgcgtccataaggctctctccagaggtagtgacggcttggtgagcctgggatgacgggggatttgtctcatcgtcggtgtctgaacaagtcgcttctgggcttcgagatcgcacaatatattgatcaagttgacccccaaccttgaggcgtttggaccatctttcacgttcctctagttcatctgcaggcacagcccgggcatgttctgctgacagctgcagttcatagaaagaaatacactccgccagcgttcggtccgagtgtatcttcaaaatccgaggaaatcgaagtgtggagtatctcgcaccagacggtttttcaaacccactacccagcatctcgacgatgaacgggtacttgaacaatttggttgcagtggggagagcttcgtgcccgtaatcaatatgaaagccttcgaacgtttcaggttcacgtgcataaaactcgccgatttgattaagagtttgcatggtctgaatgctcatgttatgtcggttaatcacatcaacgatttgaaaatgcggcaaagcatcgccctctttgacccgatctggattcagaagacagccaacaaaaaagtgtgtccatttcagccctttgatttgtcgcagatcagaagcatctcgcgcgttgtagctagctccgatcaacgcaaggtctaatgtgtctccaagacccggtatataatctttcttgagtttgatccatcggccaaacatatggtctacaccagtagagtatatcggaaaatagggctcgtcggaagccttcaagacatatccttcccaacgtttagcgattgctttctcaaaactcttttcgagccgatggtagctatcagctcggttgaagtccagaacttcctgataggcgagatccgctcggcccggaattgttttcaccactttctgtaagagcagtcgtctttcccgatggggcttggcaaggcatacgtcgtcatcgaggagaagaatgtcaaagaacatgatcatcaagtgctcgtacggttgtggcctgtatcaatcagcaaaaagacttatcattttatagaagtggtgatttacggagaatcattatcaacgccaatcatggtgccagatcttggaataaacctccgaattttgttgaaatccatcacttgaccactctggtcattccacacaagcagttctccctcaacaatacagcgggacgtaaattcgcagccaggcaatccagtgcggagcgattcttctatcacaggtatgatcttatctttatctgcggtcgaatccttgccacttttcgagaaaatctgaatgggcgtatatttgttagagagatcgacgtggatctgacagtattcaccatcgtatttccgttcgatgctcattcgacgaccgttgaccatttggtgacaatgtttgatacttcgagctttgtaatactcaggtcgtccaaccttgataccaggacgagggcgcatatgctgtagggcaattgcgttcagacttctggctgtttggggatccgggtttggagggaaattgtttattgggtccgaggcaagcatctccagcgccccttcgaaagagttctgaagctggagtaattgcggaagaagaaaatggaatttcttcagagtatagttttgtgggaaaacgaccggagagtagcttttgagaatcatgcgagtgagccatttcgcgtcccggctactcaatcgacggtacagttttgatagagtttcttcaacgtctacagctgtacgggtccggcgaacttgagggccagagaagcggcaacgcgatgcaattctcaccatggcacgatcgatttcttctaccgataactcctggcccgctgggatgtaattctcggcctgccgcatgacagtttcgacacatgctccgagatcaaaaccaccaggactttgccatcgattcagttcagaaagccgcgatgatcccaagcctaagcagcgcccgatgactcttgatagctgcattgcttgcaaccagtatactcggtccgttcgtttttcggggaacatgcaggtaagcaacgccaccctgtctgttttggcatcatggatggttcgttcgtgtcgagcgaaccactgggcgactgttttaatgtcaggattctggttcctggccgccgtggatgccttggccgttttgctattgtctaggttggacagcagatcacacaagagggtgaatttgaagcccatgacccatatctacgcgagttaactagtaactctgcataaaaccgtggaataatttgagatacagtcaaggaggtcaaaactcgcgactcccgaggtcgagactttggccgcgctgtccgaacgcgaaaagaggaaagaagatgacacgtgagcacgtgaccactttagccccattatatggagaaaatggagaaataggtgagtccttgtgattttgagggtatttagagtatccaggtgcgtgatctgccggaaatagaaggccaccatatttgatatcgagtagcgaacagttaaaatagcctcgaatcgatccattgccccgtagtcaaagcaaatgcgatgaggagcatttgtgcgatagctcttcatatctaggaatcatttcaaagagcatctcagtgaactctgaagactcatctctccgtggattaagtgccgcaaactcaaacccttctagatatatcccagcatctccccagtcaatcagccagactttgccctcggaacccaggatcaagttgcggggtgctatatcatagtgggtgagagttaacttgttgaaaaaaacggtttagtatcaggtggtgcgcgatgaaattgttgggtgatctcaagtcgccgattgaaccaggcctgtagttgctctgtcgagctgaatgggccagcccccgcgtctggaaaatggcaaccacgaaagaaacaggttatgcagcctactagggctggtagttgctcttgttctttgggtatggggataaggtgtagattgttgatgattgaagcagctttagagacgacgtccttgcgttcaatcggacttaggtcttcccagcaatccttaactgttctaccgcccacaaagtccatgactatcaggcatctagccccaaagaagagatcttccgtttggatactcaacactcgatggactttgggcactgggattgatggtatttctcccctctccccagccttcgcaatgaggtcaaggatattggcctcacctggtcgtgagcttatccctcctttaataatcaatgttcgtgacaagcgcacaatccgtgtcccttggcagttatgaagaattggtgctgtgttgaagagttgggtcagggtttcatctgaaacaagggaaacgtcaacgccatcgagggggtatttttcaggttctgggccttttctgctgacaggctaagagaaacattttgttagcttgaaataaccgtgtagggagacggattctcccacttcatatatgtcagaggtaacaagtccatattatcaccaagcggggtagacgcctagaacaagcaccagatcggcataggggatatagggctacttgtagaagaaaacagaactaccagatatataacaatgaggttataacatatggttaaatgagaaatatgacttgaagatgtgaagatatgaagagtgggaagctgcatgggctccgtacccacgtgagcacctcctagtacataagagagaaagtgaatatacaaacatcgtcgtgttagttatgtagaatctattcaaggatttagatgaatccacattttagtccctactatcatgctccctttgttctactatttaccgctcactttctccgcttgctatcgtgtatagaccaataaccttgttatcttattagatgagcaatatgcttgggtacctacatggatgtaagtataataggcagctagcactagtacccagccatgaatcagtccagagagcacaactttcctctttcccctcaacttgccctataaacttgtgcccactctctatctcctgtgaaaatgagtccttagtctcgtcagatcgaagctaattatagatgacattgtagcgaacctcctttctctagaatgtatcaccaagtgccctctttttaacctgtgcgatttatcccctcggctgaaaaggaagacatgctgaatagcactgtgctatttctctacgctgttggccatcagccactttccgagggaggcagcctctggtgcctgtacctagatgttggcgatggcagattagtgtgtattgacgctacgccatcctagaacgttcctgccatcaaaatgccgggtggatcgaaggcctttatgcttattagccttttaccatacatctacctctactcttgatgaaatccgtcatacggtcaataactacgttgtccaaatacaagtcttagaaacaggatttctacttgtatcagggaactcctaacacagctacgggatctcgccgtcctccctatcgcccttacccaccaggatctcgctccattcaattacctcatcgaagagtccacgggccgggttcgagctgtactcgactgggatggtgcgttatacctcccagttgggtcaaatttccattttatggataatctatttgggttcatgaccccaaaagtggctggcatgacacggaggatcgtcaggaactcgagacagcgttttaccaacgggctctggctagtcttgctactcagggacttgggggaataacaagagagcaactggagtcgcagaaggcgatcgggatgttacggtacggcgtggagcggcttctcaggttgaaagacgaacaatccgagcactatctagatggttaccttcggggttatcgtatagctgggtatctagatggaagcttgatgatacagttagtaaagcaatatgcagtggcatgtcattaacgtatagagccgagagttgatgatatggtatgtatggctttcccatcatttgtgaacacaagggctttagaccccagtttctggatatcaaattcaaggattgtaactgggagattggatcatctcactcttgatcttgaaagttgcttactaggcgtagcatggaaggtaaatcgaggaactaaagaggccttacctacggctggttgccatctgctattttaatcgagtgaaagatacggagtatgtaaaggttagatcttcaagagccaattcaaaggcacagctggcagtctaacttcactatagcactggcggctggagaatgcagttgtaataaaaaaattggatgttttattcataacagtaagtttgtggtagaatgagataacaggagcccatgagctaattcaaacctgaaaatggggttgaagactatgcattcgccgaacaccgagccatttgtatgaaatcaaggacgccattgtggaacaaaaaaggaggaacataaagccctctccctttagagaataccctgcttttgcaaatccaagtagatcctttcgggcataacgttaccctctgcatcctccatctgaacgacattatcccgtgaatctctgtccttcttccgatccttttcgagctgatcccaaagcgccatagcctcattgatactggtgatctcacggaagagattggtgttggaggtaatgccgagacactttaatccgtggacgtggaggttttcagagaagtgtttgtcgaatgctcgtcgacccatgtaggtgtagtttccgcaaatctcgcactgatattcgacaccgaggccatggagcttgtagagccagaatggaataggttttccatcccatgccagtggcaatttcaatgggttgtagataacctcctcgtcctcttcatctgattcttcgccggcacgaggctcgggacctgtgtgatcgagcccagcctgcacagcttcccattccatttggcgttcacgttcagtcataccctgtcggcgctcaacattgattcgtgtcgcttgtcgctgctcgcgcagaacattcgccaaggatcgaacttgatgttcgcgtcgtgcaacttcgcgctccttgaggctatgggccgaagatgtgccttgagatgctgatggtttctcgttggatgcgcctgctgctttgcgggcttctgccgcccgaatatgtttcttgccggtcaagtggctccgaaggacgttctcattcttaaattccttctcgcaatctgcgcaccaaataccctcaccggtcccttcggtagctgggccagacgcaccattcgcagacttttcatctgtccaaccgggaacctccttcgcaacccattgtttttcgaattcgtcgtcgaagctggcgaaaagctcgttcaagggttgcagtggctgaactctcttgatgaaactctccagatagctagcaagctcgccaacatagttgaaataacgatcagagagcttgtctttccgcttaattggcaaaacaggggatgtgaagcagtcgaagatatcgaggtattggacgtatgacaagcgcttaaccccgggaagattcaggtaatcttcgtgaatagttgtgagatccagatactgtccaaagccttcttcgccagtgaacatattatcgattgcggtgcggggagcctctccttcgccggtctgacggcgattatatgcttgctcgagattctcggttggttcgttcgggtagcgcttgtggtgctctttaatttcccctagctgcttgtaaaattcttcgaattgatcgcctgtcgagatagactgcacttccttctgccgcaatccatcggcgtcccggtagatctctaagagtcgctgggactgactctcaattcggtctaggaactgggagacttcatggtcacgagccaagtggcctcgagcctgattaatcggtatatgagaaagtgtgactggcaattttgggcggtatactcacatttcggggctcttccgccacgcgatcagcgatagcctgttctagccgctctagatcctcgtggatgaacctttgatcttcgagcaacatattttcaatatgactgctgcgcaagaaaagctttttatcggcgcgcaaagtgtgttgacaaagttgcgtggcgatcgcaaaagacgttgacatttggcagctccaacttgcgggaaggtcatgtgactcgaacctttccaccgcgaaaagttaggccggttgacctcactcacgtaaggcttcactcttcgtgaattccgataccatttattatctgccgttgaaatactcacacttacatcatggcggatggaatcgacagacgcgccgagggtatgtggttctaacattgggacaacatgaagcatgctaacagcaactagagcgcatggaattcaacacctccaaggaggtgacggtcgcgccgaccttcgaggacatgcatttgaaggaaagcctgcttcgtggagtgtacgcttatggatacgaatcgccttcggctgtgcaatcccgtgcgattgttcaaatctgcaaaggtcgcgacacgattgcccaggcccagtccggtactggtaaaactgccacattcgcgatcagtactctgcagatcattgatactgttgtgcgcgagacccaaggtatgtaccactctgtctaatctgatcagatccagacctaaccacgatccggtttgtaacagctctggtcctgtccccgactcgtgaactcgcaacccaaattcaatccgtcattatggcccttggtgattacatgaacgttcagtgtcacgcttgtatcggaggaaccaatgttggcgaagatatccgcaaactcgagtacggccaacacgttgtctctggaactcctggtcgtgtagccgatatgattcgtcgccgaaacctgcgcacacgtcatatcaagatgctcgttctcgatgaggccgacgagctccttaatcgcggtttccgtgagcagatttacgatgtttaccgttacctgccccccgcgacgcaggtcgtcgtggtctcagccaccctcccatacgatgtcttggacatgaccaccaagttcatgactgaccccgtccgtgtcctggtcaagcgtgacgagttgacactagagggcatcaagcaatacttcatcgccgtcgagaaagaggaatggaagttcgacacactttgcgatctgtacgacaccttgactatcacccaggccgttatcttctgcaacactcgccgaaaggtcgactggcttgccgacaagatgcgtgaggccaatttcaccgtctctagtatgcacggcgagatgcctcagaaagagcgtgatagtattatgcaagacttccgtcagggtaattcccgtgtcctcatttctactgatgtctgggcccgtggtatcgatgtccaacaagtctctcttgttatcaactacgatctgcctaccaaccgtgagaactacattcaccgtatcggtcgatctggacgattcggccgcaagggtgtggccatcaactttgtcaccaccgatgatgtccgcattcttcgcgacatcgagttgtactactcgactcaaattgatgagatgccaatgaatggtaagccacgcagctataatatttctattgctatgctaacaatgttattgcagttgcggacttgctttcataatccccactgtctgatattgtgattataacatcttttcctacgccaaaaagcgacttggcttcattccttctggggtcttctgcaaatcgggtgcgcttgtattgttgattgaatatgactcggaattcggcacaatcggtttgaggaaaatacaaggccagctctagcgtggaggaaagggataataacatatttcagtaagtcgaatttggaacttgctaccattcactcaacaaaactaacaatccgaggtagttttcaagaatgccaaccgattcgcacaccctaggaggtgtttacgattttgcttatttctaaaatttcgggcctcggcctaagtagcagggactttttttgacttcggagtttctttttttattactttttgacataggaatcatgaatgatggatttgttttactttcgtacaatgtgcctctacttcttggccccaagtctctcgtctggcgacttaaattcaccagtgagatacctaccacgcgtcaacttctgttgctccatggttacgctagttaattcctactagagcgaacctctactagaaaatagtgtgaatggtaaatttgatttaaagattgggagcaaaacaagccaagccccccccccccaaagaaaaccccaactcagaactggaccaaaaaaaaggacacaacatatatacttctcagaacccagaacccagaaagaagatacggaccaacgccagcttcctgtattaaagaaatagatgctagctgcagagcgtaaacagcatagggagtgaaaggggaattcaaacgatgtatatgcgcaagacagaatgaggatatgacgggcagttgatgaggggagagagaagaacacagaagagaattcatgaagaacaagaaaacattgcgaaacagcaggtttatcatctttcaatccaaagctccaagtatgttccctcaatcaggtacggtatcgcggaacctaaataaagacaggcaacgagcgtgaacagaactggtttcgtggtagtcattgtcgatgtggatatcagaaagtggatgtcgtcctcaatgcgctagtccgcgtgaagccatttgagggtaacccgctccgttgaactggtcctgttggacgggatcgattgctctctcgagaccagctggaagttcgagttagcggtgctgttcaatgtgagacgaggatgagagggattcttacatccttactgcattatcgtcgcctgcagatgcgaacattcccgggtctgctgggttccatgatattgagttcacgcatccggagatatgcccctccagagtctctacgatgttgccattttctttgtgccagatgtagactttcgagtctggagatagttagcagcgataccagaaatgacattttgaggtactcaccttcacttccgctgacgacaaaattctcggctgctcctccgaacgtgctgcgaatcacgaactcaccttgcttctgtcccttgaactgtcggacaagcgcagtggtttccatgtcaactagttggatctcgccctcagccagattaataagcacatgccgcgagtctttgctgatagcaaccgaggtcggtttgctcggcagtgggagacagtagtcttcttcatatgtaagcatgttgtacacatgaatcttctcttctgtgtcggcagcgacaaggcgtcgtccatcagggctaatggcacagtcctgtacacggaatccgcctttccacgtgtatagagactgaccgcgcatgctccagtgacggagctgtgattcggcatcgagagaggctgtcacaaaagattcaccatctggtgcccaggcagctgcagtcaccggttgacggtggtggttgatggtgagcagacaacaaccgctctaaaccatgcacagcccgagttagtatatcattatggatttacatgagatttaaggaatcattacctcaacgctccatacgcgtgccttcttatcttgcgagcaagtaattagttttgagtcatctggactccaactggcaaacgcaactccgtcctcgtgttccgtgagtctgtggagaacactgaagtcggctgtgttgtagatcagcacgttatggtccttgcccgcagtaaccagcttagatccatcgtgagaaaactcgcaataccatacttcatctgaatgctgagtcaagtccacaatgacatctaaagggaagtcatttcggtcgcacatatggtcagagtagagcgacggaggctccgcggtattgtgatagaagcagttgttgatttgagtccgcttgacgtgatctagtaagatagccaggcggtgttgcgggatcattacagaaggagaaatggattctgcggctaaaattagcaccccggttacaccacagacattaggcattagattagactcacttgacaactcgccaagcagtcgttcacgagacgaggtaacagagccatcccatccagtttgagtatgtaagacttcggttgagcacataagaagactaaccaagataaatggtaagcaaatcgggttctagaaatatctatagatcggcaataccttgatagggcgtgtagacgttcaacatcaaaattcaagggcgtcagttcttggcgaaggacgttgagagctgcagctagatcacgcgcttctagcatctcgaggaatttctgttgtcggagatagaatagcatctcgttcttatcggcctcctctgctaataccaacgtctcctcttgtgaagacttcctgtcgacctgttgtgacccggcatttcgaaacgactgaatcaagattctctcggcctctggccatcttccgcccaacaccgcatttcggaacgttgcgacccccgacgtctccagttcatagccgctctccgagcttaacagggatgccgactcattataacccagctcatatagactctgtatcaaaatccgcgtcacctcctcccggttatggccatagtaagtcgaagactgggatggccttttagagccatttgcgtgagagctcccgttggttgccgcttgtccgttcaaaccagccttcctcgatgatgcaagtgattcgttcgaggcatctacgaagccattttctgttgatgttccgtcgggacgcatgattaccaggcgcctgcgcttgggggaaggagatcggtcgtccggtcggccaagacgatgactggggtgattctgagaaacagtatcacgtgctatttgtggaaggtttccggtccccgccgatgagggaccaacgttatccgggctgctcgaaagacggcggcgacggttaggccgaggggtagatgagctgggtggttgagatgcggcggacaggagctctgacgtttgggaaccgggattgcctaccgaggcgggagctgtattgacgggtaaaggaggatcagggtggtcggaggtgatatagggatgatgcggtgatgaattgtgagccagttcgacagtatctttagatctgcccaatctcctggttctttgaaagaaccaggtgagcagacctcaagcggtggcgggttgtccgataagtaatcgccgggagctccgtcgaggaggggcgatgcagctgtcacaaggtcaaatggacggtcactagctcgagctaatagtcatagatgtagcaaatgatcaaagagctgtagatcttgcgaaatcacgcggttgtgatgttctccgctttgattgggaactggttggggcttatcggtggaagagagaactgccagtctgagaaagcaaagtctgaatattgatgtggaatgtcaagttatcagatgtcaaatgtcggatgttaaatttcgaatggttgaaagtgcagaaaataaaaaagaggattgggtacgcgcggaaaaggtcgacgatctactccgtacatagagcgtaacaccttatgtgctcccttactatatgagtacaggtatagatatatttgtacgacagtaaaacatatgaactaattgaatattcgttgaagtactcatatacaacatatatcatacatctaatctatacctccgcctctaccttcctcgcctattagctgtcatgtttcccatgtttaccccaagagactggagtcactatccttaaaggataccttagatagaagatgggagatggagaaaggttatataggtaagatatttttcgttgaggaaggtgccctgcctatttgggaagggacactcccccattgttgatcgtcatgtggacatatatgatgccttatacagtcagtccagtagctacttcatcaagcaactactgtcaacaagaaaatcggtctatacgcttgagtatcttcgaatgaaaacaagattgcttgctcatagcgagctccccgatctagcgccgtttttcccttagaaagagcgttacgagcaatataccaatatgagatagctatgaaagctcctctaccaatctacctcgagagctatacaggcttaataagcaatacaaagcacctagttaggcacttagactagttagctttggaatcgccgaagtatacgtgtgtggtcagtagaattctacctccatatttccatcaaaatgttctgcaaacaaccaatgtcttctcattcgtccattctttcttattttccgctctcttggcgtacactatatatcgtgttacttttccgcaacgacgttcttccgatcattgatacacagacgtcaatgatacttacattctgctatatatattgccggatgtagggtagttatccatatagacagattactactccattacataattcctgtagtaaaagctgccttggtttctccactgacgccatgatgatgatgccagtcatgcggatatataatcctcttattttgcgctcaatctccaaggtcctcttcatcaccactattcctatacttctacttcctacaaatactattaactaccttccaacttattccacatcttttcatcatgggttgtggttgcggatctaactgcaactgtaccggcggtgcccagagctgctcctgtggcgacaactgtaactgcaagggatgcggagtacgtgatatcctcataaccttggaatgtttcatgttcaaagactaactcagctgtctaatcttagaagtaaattatttccccacgtctccgactccaatgatgaatatggtgatgatttgacgcaaggaatcaaagttcatagagattaaattcgatctctcaaatcaaaaatgtactcccaagtctttttcgtgacatgtagatctcatcggttctctttcaacactgcctcggaagctttaagcgctcccgtaatactaaaacatataaatggcgacaacgcatacatgatctatagatatagtcagcgaaatatcttttccccgtaaagccacgtaccgtcaacgttttcgcaataaccatcttttccatctcagacgcctgcgccaattccaccaaccccgaaatcaccagcgccgggggaccagcaggcatcagcatcatactaaaccagagcattggatcatcaccaaggagacgagtcctcttagcaagtccataaatcagtgaaatacttagtgccggccagatcaccaaacgaacaacaaagatagtggtgatagccttgatggggatacgggccgaattcccttctgcaaccgtccgctcgaacgtgaccccaagcctacacccaaccatgaagatttgcagcgttgtaaacagcccgccgatgttgctcacacttgcagtcagccacgcggtgaatatcccgccatcatcttcatcattgaagaatgcccggtgcaacgcggggactagacccagcaccgtaccgacaatcatgcagattattgccacgtctgctaatggatactcgaagggtgcgagtagttcttgcttgactcggtgcgggaataatgagcccagccagtgcgtcgacctccgaatcaggttcccagctgatgttcgggcttgttgggcgcgctgcgggagcaatgaggtttcttcggtgagttgctcgtcctgtgctaggatatggtgtcgctcctctgagctactaagaccgtctccacgatcttgtaacatcctcggtccgacgacataggcgatggtcttgctgatcaccccgcaaacaaggaagtaactctgagcacgggagattgccgatgatgtggtttcaccatgtcgtaggatcagttttaaacttcctacactcccaggggagtgaagaagtaacaagggtagagacgtagtgttgttgaacgagcaagccggtgtaacccattgaggtaggccaagcagatatgacgataaatggccgagactaatggatgcagatgtgtagagaactgaccagactagtaatagatggatgcgataggttactgttagttatgctgggttcaacaagagtcgccatgatatacttatgactgggatatagttcatcgctgtctggagatgaagctgctcgccaagattcacgatgagtagtgccggtaggaggagtttcatgcctaatcccaacatgtcattgattgtagtctcctggagcaaatggagccgacgagcagcaaaaccatagcccattgttaacagcacggaaacacaggcttgtagtgcacccaggaagggtgttactaagccttcgctggacatatttgctttttgaatcgctggcgctatcagctaactatgttttcgtcttcaaaaacttataattctaatggccgtggcgtcatggtgaccgagttaactacaaatttaccaaaaccgctcgacattgtatgagcattcgactatcccaaggacatagttccgatatatattatatatatatcatccacactagaaaatattcgggccttcgggggagtctatcaccgagcacggggattccccgtagggtgcttgctatagttaagagacgatagccctaattgggctgcatcttccttctccaaaagcctcaatcacttcaagtggactttaatcacgcgatactttgcagtctatataccatagatacaagcccaataaatataatactaataacacttctccaaattggcccgttcaaacgtgtggggggcctcgggtaatcggtcggaggaaggccgagttgtcctctcagcgcaagaacataaagaacatcgttagaaagaaaggacagtctttctactcttcatctatcacacaaatccttctcggtcttaaacaatgtcttccatcatactccgctcagctttggaaaccacgccagtggcatacggcttctggttaacgtatgtttacaccccgcatttggagaggggcatcaccatcccccgctgctcttctcaacctcaaagctgtatccaacaagaggaaaaggaatcaagctaactggccttctaccacagcctccccagtgccgccgtcgcaaagacaattctccgccgcagtcccgagttctcggaaggtggattcagctgggttctagttgacgctgaacatggattgattaccgacacccactattatgaggtttgtcattcgagtgaattgaactcgagaatttattattgacaatcacatctagctcactaatgccgtcggccacgagggtgctagtcctattatccgtgtgccctggcccgaagagtggatgatcaagcgtgctcttgatgccggcgcccacggagtcatgactcctatgtgtcactctgcagtatgtgtaacccggaccgctgcgttcgcacttttctctttatctgtcggatctgtatctcaaatgctaacacccgcttttctgcgtctaataggaggacgctgccaaggtcgttagctactgcaagtacccgcctgtcggagtccgtggatacgggcctatgtttacgccgcattcatttcccggcgtgaagcccgccgactatgacgacaagacgcacggtgaagtcctcgttattgtgcagattgagtcgcggccgggtgttgagaatgtagaggagattgctaaagtcgagggacttgatgttttgtttattggtgagattggacctttctgtttatggtttgtggaattggctaacgggtttttcctaggacccttcgaccttgctaagcagatgcgtgtcacccgcggtggcgaggagcacgaggctgctatccaacgtgtcttgaatgctgctagagctgcagggaaaaaggctgctatcttctgtatgtgttctcatttccgatgttccatggctcatgtctaatattgcgttttttaggctccgatggtgatgacgctcttcgccgcacacagcagggctttgatatggtttccattaccaccgatgttgctgtcttcggtgacgggatgctcaacgaattagagaaggctaagggcacttctaaggtccaaggaaagcgggacgggtattgaactgtttcggaattatattgattatgtgtacatataatccacgcaataaattcaactatattatcattctacactgtaaaacgattgctctcctccattacctattattcaaacttccaataaagctttggcttggtcacttctttgtcatcttcactctgtaggcacctggtgtcaccgacttgacagttccattttgctcgacatcaaaaacgaaaagcgaggtagcaataccaccccaggtcaactggtccagcatagtccagtcgttaagatcgtagaacgaagagaaaagacttgaagaggaaccaactccgggattccgaccctgagttgcagtgtatccccggaaagcgatttccccactggcctgttcggagataatagacggcacaagtcgtgacccgacaccaccaaggagtgtagacactagagccgtgatatctgtcccattgctaatccacgaagtgatattcaaaccaggcgcgggctgggtaggtggcacaacagcgagtgtcaatgacgaattcaggtcttcggctttgtatgtgccggcgaacttctgcactgcctctgctgcggcttgctccataagcgccgggagtatagcatcgacaataaggtcgatcgccaagagcgcctcgctgctgcggctggattgcgtgctggctgagaggagagtgaagccggcgtcgaagtccggtatcacgaccacgatgccaccgtagtatcctgagtctccgagtttcgtgtatagatcagtgaccacgcctgatcccgcgtggacatatcgatggatctcccatggtgagccgaccgagtagcgtaaacttgaggtgtgagtgattggcttcatccattcccgtgtcttttcggagggaaggagggtggaattcaagagggctacaccaagcttggaaagatcattgattgtagagaataatccaccagagggggttgtagcgcctccatcagggatgaactgctcatcaagagcctccgatgtgacggaatgagggcgggtggagttgccaggggttgacgagtaagtggacttcaatcccagaggttcgaagatcgattcactataccattcgtccatggtctttcccgtgagatttgaaatcgcgagaccgaggaagatatagccgccatttgcatactcggggctcgtccagggaaggtaaactgggggccttggggcgtatgccacatcccaggagactggattgcagccctgggtctgttcacccaagcaagatggccataaagatatgtcactcccgttcagcggtgggagaccgtagaagtttggatcagtcaacgcgggattgtgagagtgttcgagatacttgtatagaagaaaggtttgtaggaattcttctgtagcaccatggggtatgccgctcatctgacctgcaagggatttgagggtgactttgtcccattggacatcatagacaagccggaacttgtcatgttgcttccgaacacgctcggccaagaatgggaagatgtcggtaagtggacggtcccagtcccgaggtttcagctctataagtccagcaaggactgtgaagagtttcgacacactggcgaccttgtaaatgctgtttccatccaccttatttaccccaaccggggagtttgctacctcactggcggtgtgatgtaattgaagatctttggctttcgggtcaagcgtggaaaataatccagcagagaatgtgaggttcttcagcgcaaagactccactgcttttgttggcctggttatcggcgaggacggtgttgagttgagaagttaggttcttccaactggcggcgactcgactgtgattgctagacaagtccctaggaggtgggtatgacggtcctagaaggttggcaaaagccgctgccgggaggcaaagcaagccggtgagcacgtaattcggtcgcatggtgcttatgagaaagaattgctgaattattccaaaaagtaggttgatgaattagattgaaatttcaacgaatgctgcacgtcggcctggtcttatacctccttcaaactgccatcgaataaggcgctacgttcattctccatacaaggttatgtcatatttagctccgtgatatactacctgggggccatcaaccaggatctcaatctattggtgcatccatgtcgtggggtacctcgatttggtccgttgtaccgctctgctggggcaatgacacgatgagccgctctagtttgctgcgttgaaccatttctggaagccttgattgatgatccttgaggcggtgtcattgtcaattctatcgatatatgggtgttcttcagcaatacgaaccttcgtgctcagccaaagccactgacatcgcgatgcatagggacactaaacccgatcgggtggcatgcggcgctctatgtcttggcatttatgcttcgatgactacgcggaaaccgacctgttgcaacgtgccgacgcatgtcttgcccaccaaaaagatcacggtcatcacaataaacatccagataggcttggttgagtcgtcatgtacatccccgacccaactgcccatgtggtgcttgcgttgttcagcgccattgttggttgagaagaagcagtcaaaggaccaaaatcgagagttccagtagaattatcatgcgattttctctggtaggagtttaagatggtgtgaagaggttgaaaaagcaagagaatggatgtggcctggatagctttcctatttaggcagtcacgagctgagcacatacttacggcaagtaccggttctttcaaagttccctgcgtatccattatgctaggaacatttttggtgtcttatttcttatcttattgctggtaacttaaagggcgattcgaattataacacgggaccgctctcacgcgcttgcgtttgcccctagttttcgcggtggcaaagatgccggattatccatagagcacatttcagtagcactctcatcaatgataccttcacaggtcgggtcgtcatagcttgttaaaggaatggacttgacgaggcatgggcgttttggatgcacgttagaagatttggtgtagcgtgaattcagtcagattagttattcatttgctatgagactgtcagggccagttgagcgagtagctatgtgggacttggagggaccaattattcagtaatattcagtaaagaagaagggagagatctctaagattggaacatactttggggtgttggaggtcgcctctgcagtctcacaatagctcctttattgattgcatcacataattgtagaagatatcggagaactttcttgttctcatctttctccttgatctataacagatcgagaacagccaacatctattgattaatatcaactctctgaccggcgacatcacatgagagtagaatgcaggctttgaagtgatgttgttttggctcaatacgacgaaagtagcgcgagtgagagtgggcgttcctagagaggacatgtgaagccactatcattatcgaccccggatttgtatgatgtctgtcaagtgtcgattggacgatatgtattagctgctcacatgttgaccgtctatttgagactttgagccatgtcacattatatgacccagtggtcccatgcaggccctactacttactcctttgcctaggctctggtttcaagttatcatatatggccttaatatctagtaacacccaagtgacactatattctaagctttgaatctaagctttgctaagcctttgttgtgctaagaccttgtatgctgcctttgaccgcccctctatacgcccgacatcctttgatcctttcaggtttcatcggtgctccccaaaagcacggtttgaataatggcctcttataggagttgctgttcagactataaaggctgctgttttcgtccgtagacaacgatttctacacaaccttcaaaccctttcgccacaggtcaccactagccatggagccaagaccaaccatcaaattcaagttgaatggagtattgagatctggggctgaaatcgatgacttggaactccaagcttgctatcgcgctctcgacaacctgcggagcttattgtttcaagcaccgatgctggaccttctgagagagcaaatcaaggaaggagaccgctatttcgaatcgctgattcgagcctctcggggggaattcagagaatgcagaacatttatgaaagtggccggtgtctcggcgacagagttgagaacactctgcaaccgctggcaactctccaaacccctcgaagacatggcacgaaggattgtattcccaacgcacccagagaactatgcgattatgcattccccaggagctcccgtcagaagtgggccagactgtggggtggaggtcatcggggaccacatggcgaaggttcgatttgtggatctcatggtaagcggagagattcccaggtggatgtcggcgcagcgagatgacagttatgaaatggcggagtacttggtcgcgaaacttgagagtgggagcaagtttttctatattatgaacgaattcatggataccgagggtggttgcaggatcaagctgcgggcctttttcccctctgcttcgccatggtcattgatcaatcaacacgccgagcatcttgcggtcgagtttcgaaatcttctccgaatcgtccatgagaccattgaggaacttgaagacagctattgaccctttcccgaccgagacagacatcatcatcgccggacattagtacatatcatggattattccaagtcgtcagttttgtttctcatatagttttctgcaatattagcattattggattgatttccatggttgttccaggtcattatgggggagacgcagtagctcatcgaacttgtaagacgaaccagatccctgttcagtgattcaagtagttctcaaaaaccgcagtaacagccaagcagaaatacttctaacattgtgagaccgataaaaaaagccaccagaagtacagccaagctgaaggatcggctttgcatggccacaattcggtccgcggggaagagaccgaggattggacgattagatcaggggaactccacgacctttgagaatcagactcagttttcaacacctgtaacttgcagtccaaagcgaatgctaggcttgggacgtcctctattgaaagcgcgggcatcattgttggatctgataaccgcaaagaatacgttgacacagccatcaccgcccgccgagctgccaccgcttccagactcgccctcctcaactaccttcacccactctgtgtctacccattccacacagtcttcttccattatgacttcagacgattctgagaaccatggctcgatcttttcggtctccggccctgtcgtcgtggccgagcatatgatcggttgtgccatgtacgagttggtaggcagccccagctccgagatggtggagaaccccagatactgaccgcatagtgtcgtgtcggtcatgacctgcttgttggtgaggttattcgcattgagcaagacaaggccacgattcaggtctacgaggaaacaggtagagctccgcagcccccgtttgatcataccccctcagagagctatgctgaccgatgtcatctttgaataacagccggtttgactgttggagacccggttcaaaggacaggaaagcccctttcagtcgagcttggccccggtctgatggagacgatctacgacggtattcagcgacccctcaaagccatcgcggaccaatcgaagagtatctacattccccgtggtatttcggtcaatgccctggaccgggagcgcaagtgggaattcaagcctactaccttcaaggtcggcgaccacatcactggtggtgacatctggggtagcgtgttcgagaatagtctggtgaacgaccacaagatcctgctgcctcctcgtgcacggggtaccattacccggattgctcctgctggcagctacaccgtcgaagagaagctgctcgaggtggagtttgatggtaaaaagtccgagttcggtatgatgcagacctggcccgtccgtgttccccgcccggttagcgacaggctgtccgccgatgcgcccttcattgtcggccagagagtgttggatgccctcttccccagtgttcagggtggtactgtctgcattcctggtgccttcggttgtggaaagactgttatttcccagagtgtgtccaagttctcgaacagtgatatcatcgtctacgttggctgtggtgagcgtggtaacgagatggccgaagtcttgatggatttccccgaagtacatgcccttcccaaacttactgcgataacatgttactgactgcatttctttcccagctttctattaccgtcgaaggccgcaaggagcctatcatgaagcgtacctgtctgatcgccaacacctccaacatgcccgtcgccgcccgtgaagcctctatctataccggtatcactatcgccgaatacttccgtgatcagggtaaggacgtggctatgatggccgattccagttcccgttgggctgaggctctgcgtgagatctcgggtcgtctgggtgagatgcctgctgatcagggtttccctgcgtacctgggagccaagctcgcctctttctacgagcgtgctggcaagagcagtgctcttggcagtcccgagcgtgtaggcagtgtcagcattgtcggtgctgtcagcccgcccggtggtgatttctccgatcccgtcaccagcagtaccctgggtattgtccaggtgttctggggtctcgacaagaagctggcgcagcgcaagcatttcccttcggtcaatacctccatctcctacagcaagtacaacgcagttttggataagtactacgagaaggaccacccggaattcccccgtctgcgcgatcagattcgtgagcttttggccaagtccgaggaactggaccaggttgtccagctggtcggtaaagcggcactgggtgattcggataagatcacgctggacgtggccagcttgctcaaggatgatttcctccagcagaacggatacagtgactacgatcagttctgccccttgtggaagaccgagtacatgatgaaggcgtttatgggctaccacaacgaggcccaaaaggccattgctcagggtcagaattggaacaaggtccgtgaggctactgctgatatccaaagtgctctgcgcggcatgaagttcgaggttccggaggacgaggcggaggtttcggccaagtacgagaagatcctccagtccatgactgagcgattcgcttcggtctcggacgagtgaaagtgacatcttaacttagcacgtatttccttttagatgtttgttcgagcacattcccctgtagttattgtgtccaactcgagttactttttttccattatggttgcttaacggtataacttctagatgtacatgtggcccgtacgcgtcaggcagcacaagacatgcgcacatgacccaatatcggatctgttaggttatttggcatgttgaaatagtctctttctttaggatatccggcttataacactatatacactattcttcactcgtcagtactttgattgtagcctaggccgacagaccgggacgccactacatcaccgccttcgtgagccaaacaatccctccacttacaccgtgcacctccccggttctacttcattcgacttctctgttgcctcgtttttcttgctttttccatattccttgcctagaagcagttttccgtatcccaaatcgccagccatggcaagccccacgaccggccactcgtgcgcaaacccctgtccctttcctatgcggtctggctaatctccgtgcagcataaatgtcaatgaccccagcttgatttcgctggtgaacaagcttcaagatgtcttttccacagtcggtgtatgtatacttgatcagaggtcacagatcaattgtgattacaggggcaccatgtgcgctaacaccgctactcgttttaggtgcacaacccaatcgatctgccccaaattgccgttgtcgggtcgcaatctagcggaaagagttcggtgctagagaatatcgtcggccgggatttgtatgttgcttgttttggggagcttgcgcggccccgtgcacgccctcggtggcggggcatgcgccatatgtgaataattgctaaccaagttttcgccttgcagcttgcctcgtggctctggaatcgtcactcggagaccccttatcttgcaactgattaacaaaacccccaccacgaacggggagaccaagttggagacaacggacagcgagtccaacgtgaacgagtacggtgaatttctacacctccccggggagaagttcttcgatttcaacaagattcgagatgaaatcgtccgcgaaacggagaccaaggtcggaaagaatgccggaatctcgccctccccgatcaacctgcgcatctactcccccaacgtcttgaccttgaccctcgtcgatctgcctggtttgactaaggtgcccgtcggagaccaaccgaaggatattgagaagcaaatccgtgatatggtcctcaagtatattagcaagcccaacgcaatcatcctagcagtcacctcggccaaccaagatcttgccaactcggatggtctgaagttggcacgtgaggtggacccggagggtcaacgcaccatcggtgtgttgagtaaggtcgatctgatggatgatggtacggatgtagtagatattctcgctggacgaattatccccttgcgcctgggttatgtgccagtggtcaaccgtggccagcgtgacattgagaacaagaaactcattgcttatgccttggagaacgagaagaacttcttcgagaaccacaaggcgtaccggaataaggcttcctactgcggtacgccgtatctggcacgaaaactgaacttggtaggggttgaccccaatcgtctatgaaacctttggactaacggacttcctatttttagattcttatgatgcacatcaagcaaactctgcccgatatcaaggcccgcatttccgcctccctccagaaatacaccgcagagctagggcaactaggtgactctatgctcggcaacagcgccaacatcatcctgaacatcatcactgagttcagcaacgagtaccgtacagtcttggagggaaataaccaggagttgtccagcatcgagctgtccggtggtgctcgtatttcttttgtgttccatgaactctacgcgaacggtgtcaaggctgtcgatcccttcgactttgtgaaggacattgatatccgaactatcctttacaactcgtccggttcttcacccgcactatttgttggcaccaccgcctttgagttgattgtgaagcagcagatcaggcgactggaagagcccagcttgaaatgtatctctctcgtttacgacgagttggtgcgcatcctgagccagctcttgaccaaacagctgttccgccgctaccccatgctgaaggagaagttccatgctgtcgtcatccaattcttcaagaagtgccttgagcctaccaacaagctggtcaaggacttgatcaacatggaatccacctacgtgaacaccggccaccctgatttcctgaacggacaccgcgccatgactctcgtcaacgagcgtcaggcagccgccaagcctacacaggtcgaccccaagactggcaagcctctcctcccagcccgtgcccagagcccctcgctcgacaccagcggtgaggccaataacaacagtgggttcttcggcagcttctgggcttccaagaacaagaagaagatggccctgatggaggctcctccggcaactcttaaggcttcagctagcttgtctgagcgtgaagccaccgaagttgaggttatcagtaagtggactagctcatgcagaacgcgtgtgatatttgactaacactcacgcagaactcctgatcacttcctacttcaacattgtcaagcgcacaatgatcgacatggtccccaaggcggtcatgtacaccctggtccagtatgtatcatccccaatccctttcgtcgagtatactaacaaatgattttcctaagattctccaaggatgagatgcaacgcgaactactagagcaaatgtaccgcaccaacgagctcgacgaactcctcaaggagagcgattacacgacccgccgacgaaaggaatgccaacagatggtcgagagcctgggtcgcgccagcgaaatcgtcagccaagtccagtgacgaaagagtggacttggtcactagacgatttatccctagaggaaaaaatcatcccattgaccgctacgttggtggagttgggctcctcgcatctctttgtgatttttgcaacacgctccgaatatcttgactatactccgtacttgctttgctgttcctaccatcccttggttagcgacttgttccgttggtccttgtttagatgttgatccgggtggttcgggttcggatttcggattttcgtcttctttggtttcgataagagggagttctttgcttcaccttactacatgttttcttttctttttttcccaatttgagagctctataccgttttcctttctcattgcttggtctgttgtctgcgtttgcggacttcctgccacggacgcccggatgattgtatcaattaatgattctgtctctgctttatgacttagcttagaattcaaatgttgacttttcaatgttttcatcatttacgttatagttcatatcagtacatgcaggggcggtaacttttgagacgtgagaaagctacagtcaacaagaatagtgccaatacgatttggatatccaataatatccgcgcgagcaaatgctagacaacaccggttttttatgtgtgggagatgagaaggtgattatgaagatgatgatgtccttcattctttacttccgcagtttgatgtcgcagaagtgctttaaatacataaaactggaaattctttccagtagatacaaaacaagttgagcaagcctccctagcgaacggcgaccgtgacatggacgttgatgatgtccatggaagcaatgtatgctggaccagtttgtctttcgagatgacgagcttccattcaatgattccatgaccgcctgccaatggtttcttcggggtgtggatgattcttggacatatttccttggtgcctttttcttttgtgggttatggctgtcctgcaagtccacggtggtgaggagtgttgtgggcagagtttgatgtgggggggggggggtttttcttgttttgatctgtgccttgggcttagaattgtcagcattattgtcttgaacggggctgttgtgaaccaaggcttaccatactcatgattctttttcttcgtgacacccgttgcgtgagcatgaaggagggttgaaaatgacagagacaatgccttcgatgtatttgtgaagcctcgaagttgtcagagagtttgtggttggtcatgagtagtttcagaagagcttgatagttggcgctccttgtttcagtgtgccaacccagtctagtgggaagtgatccagtcaagttcaaaagtcgatgtcaattgatgccgtgcgatgaacagttgttgaggctttgtgtctcggaggcgggctctttagtaccgtttcgtggagaatcaatgtggtcttcggtattgggatttgatgtgacccaaaggtggaggtattgagaggctggtggttgtcgagtgctgggaattgactggatgatatgcactgacatctctatactgcaaccttgcgagaccactcttgtcggctttcactacttgatgtcaactcacagtgggcagcatcgatataccagaatcaactcgcagtggacagactgatataccagaatcaactctaagtcccaggtaaattaggaacagtgcaccccctgagcatacaacccaacacgccgcctattggtgctgggaagtatggtgtcagaggatgatgttcctaattcactcgtgagcgtcgagaataatggttcttcagtgctgccacggtcccaagtaccagaaacatggatcccttgatcatacaacccaacacgccgcctattgttgctgagaaatatggtgtcaagaggatgtattccgggctcacttggcggccgtcgaggataatggttcttcatgctgccacagtcccaagtaccagaaacatggatcgattgatcatacaacccagcacaccgcctgttggtgctgagaagtatggtgtcaagaggatatatctctggctcacttggtgactgttgaggaaggtagtgagggaccggcaggaggtggtctgcaacattgcagcaagttgatgggtttccgcattggactgggtggtgggatgaccgtatgagatgggattgagttaagcaggaagttattcaaattatcgaggatctcgtgggttggtggtgactggtgactagaagtgttagcactggcaaaagcgaatcacaagttgggagacaaacagtcatgtcattgcatccctcttcattcaggtggaatcatgagctctgctggctgggctatagtagaattggaagtgtcgaaagactccagtggaatcatcagggaactgtgattttggaagtcagccttgcatctcaagagacgatatttctgatctcaccaaatccctttctcttgcgaagatcaaaagcaaccaattttccatcccttttccttgttccttcattttgtcccgtctgatgcaaatccatttcctccttcttttcccttcttttgtggtttgtttctttccctcttttcttttctttttttttgtagctgctgttgtctgggaatgatgatgatgatgttggttgtttctttttcttttctttctttttcgagctgagcatcaggcaattgccatggggggttccattcggatgcaaacgaggtttctttgcgcagaggtatgtggtcaatgatgaatatatggatgttgcggtggcagtcaggaggcatttgccggtggagaagtggaggcagccctgttcggtggttggcatgttgttgtggctgttcagaagtgcagaaatgtgtggattttatgtaagatgtgatggtcatgcacagtaaatcaatgaagtggcgggcacatgcaacaagttgcgaggaaggcagattgaaaatgagagacgctgttcctgtggcagaaggcaccaatgtgaacttgcgtcagccaatggatcggctggttagatcttccactcatcattgcagagcagaagaaacagagaggtgagaagggttcgaatgctcaatttcttacccggatatttgcaaactgcaatccaggttgctgttcgtgatgggtggtaggctaaaagcagcaacatgtaaatgatatagcgtttgaggcaaagcctgtttcaagctgcaagggtttgttttgattccacatctatcacggttagtaccgagcaaggatggaaacatagtgatatagtgatggaacaatgttgatgaaaggccaagggatgacatggtcaagtcaagatgggttaggggagaggaagaatatactcacaatgcacagcagagatgcaagatcaaaagccacagtgatgaagcccatagggtgttaggtctatgagacaagtaagtgcatgtcagtgattgaaggatggtgacaggtggtaggcagacttaccttagtggacatgatgtgccacgtgagtgtgggtgttgacatgacagatgtgacagtcgcaactggcagtcagatatggtgacggactccatttccaatgaatcttgatgcaagatatgatggaagatgtgatgtggagtggacaagatattttgagacccaagctgatgatggaatgtacttggggtgataaaaccctagatggaagaagggggattgatggaatgaaagatgaggaggatggggagttgaagaagagagaaatagtaaaggaggggggggggggggggggtttnnnnnnnnnnnnnnnnnnnnnnnnnnnnnnnnnnnnnnnnnnnnnnnnnnnnnnnnnnnnnnnnnnnnnnnnnnnnnnnnnnnnnnnnnnnnnnnnnnnnnnnnnnnnnnnnnnnnnnnnnnnnnnnnnnnnnnnnnnnnnnnnnnnnnnnnnnnnnnnnnnnnnnnnnnnnnnnnnnnnnnnnnnnnnnnnnnnnnnnnnnnnnnnagggggggggggggggggggtgttatataggtaggaaatgtgactcgcttaggaaggtactttccctatttgggaagggacaatgggagacaatagaacccgtgggggccttcccaattgcctatggtcatatcaggtgatacccaccagccgctagctgcttcttcatgtggtattcacgacctggtcaggtacatgaaaccgtcttctagtgggcatccttgtagaaggtatgaagaagtgtagctttcaaactagcattcgtgataagccaatgccgatatatagcccagaattgatgctgtaatcataatcttacagtgcaaagtagatttattccgggataagagtagtcgaccgcttatgcggccttgtcatgacattatggtagtcttcttagatcttagtctctttggatggttttttctatatatatcatccccccattcttaaatttttctaattaaacggcggcaaaaagaagggaaagctcaatccacgtagacaactttctagacctttgatctatgaagcctcggggattggagataagctttttgacgccagactgtgttcggaatagcggatccgcccgtcatggcgggtcaccacctgggcaacatccatggaatcatctaatatccttgatgttgcgtcttttttggttggctttctggcttattactggaagtcgcatgggtacaatggtcgggaaaagtaagagaagtaagaaagaatcagaattgaccaagctctactttcgcccggtatgccgataactatagtgccaatcctctttcttcaggtcttgtcgcaccttgtaattcctctctgcagcctcaataggccccatatccaaatcggcaacgacgaatccctcctcagtccccatcttagcaatcgaacccactagagggagcgtaatctgcgataggcccaagaaatcctccgacggcccggcggcgttgacgaagacaataccacaggtattctcaaagcagcgggatgtaatggtcgactcgaggaagagggcttcagaatccgggttatacgcgcgagcttcgggagaggcgtcgtggggggtccctgatagaagtttgagttagatcagtgaggtacaggctaggaaaaattcaacatacagtatgtaggcacaatcacaatttccgccccgtcgacgatcagttcccggaatgcttcggggaatgccagatcccagcagatcatcattcctacgcggccgatcggggtgtcgattgccacatggggctctgaccctgaggaagtgaggtagggtcgttccgggtgccagatattcttcttgcggtaggagccgagcacagtgccatcgtttgagatgaagtatgctgtgttgtagagcagggttgattgatcgggccccgtgtgcttttcgatgattgtacccggtacaatacagatttgcaatttcttggccaggcgttgatagttcgctaggtactcggcggacttgccggcctggactgtccaaaggggatctgtggggaccatgccgctgagatggtatctgattgactcgaatcagccagtgttcatttgttttggggctatccagtgtcgtcagacaggaagtctaataacacatctcttactctggaaggacagctagctcggcgccctgagcagcagcctcactgatgtagttgcatgctgtcgcatgattatactcagggtcaagctcctgcgatactgttagcaaatccgatcgcaattgcatgtcttcaatggttcgaagctcgggtacagcccaagtcgatgcaccgaccttgatatgccattggattacagcaatgcgatgcgtagaggccattttatgtcaattctacaggtacaggaagcgattataatggagagaagaaaaaaaaaacaaactatccatggtcatccactggctaccccaacgagaaattggggtcaatgacctcaacaatcccaccccgccgcgatcaaatcgtctatccaaaaatcaacatatccagtataagaatagtcggtcgcgtatgaagcctccgtccttgacctagctcaatgtattgatctatttgacttaagatgagatcggggacttcgtttgccacgaccttgggctccgaacttggcctggtggtcccattaaccactctccctcagccacatccccatccaatatcggaactaaaacctccccgcttcgttcatcgacagcagcacaaagattctaccccgttcactatttctgcatccagagggataaccggcgcttcgccatctagttcccccttgatcatgccacagcctgacgcagcgccatcttcccagtggcaagaaagcattccgaattactaggccatcctctctgaccgccgaaacactcgcacccacccacccacaacctaagactcgtttaatagaaaaatacgattcctgcggcgtagggagcctatctactcccgataggtgcgccggccgtagcgaaagaagagtcgcgatcttcacgcagcagctgggcgcttccaacgctcaccatatttacgctagacgaagtgccctagatctaccttgttttctaagttttccgggttcactggggcagcagagacggaagaagaaacagctgcctctcccacacgtgaaattcccacatacaatatagctagaaggatgatcattggaaatggtaggaagacatgccggacacactttacggcaatattctctgtacgaccaagggaaataatccttggccagcgagacaatatcggcgagtaaaggaggtacagatacggagtatagtggagtacccgagagacatccctgaaaagtgaacaccttgagaattgatattttcaggacaaaataagtctgtcatacccctgaagttgaagccgagatgagtcaaacagctgcagtcccaaggtaaacaaacttcaaagtccaattcaaaatctgactagatcttgcatactgcttatccgcacttctgatctgtcaatacttcgtagtagggcttagatcttcacggaattttagaatagcctggcaagaatgctagccctaggagattagaagtccgaatctttgtgaaatagatgttatgctgctatcttggcaggaaatcggctatcttccactacgggtttaggaatgacctagatatactcggcctcgggggacatgctttagtacctgcaaaagaccaccccttcaaataaagaatgtcgggccgcgggtgccgcttaatttctctcgtttcaaggatatatatgggcccctcgcatttctttgtattcttgtatctcctatcagcaggtttcggtaagaatgcaagtaagaaggcgtaagacacgtcgatgaatgattggagataacaccttccactgccaagtatagggcggctgtcctacgggagatggagaatgcaggtaccaattagaagggggaaatggactattgatatctcggtagccctaacagcatagggggaatcctgctaggaacggcccacggcatagccggaatgaaaagcgggccgatctagaacatccctttcatattagacgatggtggacaatcgaattgatgacgatggccgagtttcaggtttttccaaggttgggatatatgcgatgccaagaaaaaagcatagccatgatcacatgtcaatgcgccgagacttgcatctattcagggatatgtctatatcgcatatcgtacatgcagcaaggcagtgaatcccgatttttgaatccgtccgagtgaaagcttatcgtgaaatggaggtgggaagaaccttggaatccactggagctctttgtttattttgatatatattcgattgtgatatcatctgtatactattcccaaaacaatccaaggtgtctacatcgccaaatctagaaatacactttgcttcgccacaaaccgacaaagacggacaaaagggatcgacagaccacgttttctgtggcagatgacagtaccataccgtactgtaagattcccgcatgcgtgatttttccatcgcagctattaccatttcctttttctcaattcgaccagttctcttattcttccccattcatctccttcctaccttccctccgctatgcccgcgattacctctacgcaaaatcgtggctcaatgccacgcggctaagagcggcctccccccgtctcttgcacgaaacctctccgctcggtagcgctcgacgggaccacatgtatgtatcgcgaaaagccaaactcgagatgtaaaagctaatgatgcaataggttggaaaaattcccctcctttcgagagcaccccgtctcgacatctccccctttgcggccagtgccagtgctccctgctcggcaacggtctggccgcagtccgttcaatatgttctcggattctctccaccgagcgatagcctacaagaaaaagatcccgattctaaacgaactgcacctcaatttcatctttctccactatgtctacatcatatcctgggttatcatcggctcggtcatcgtttaccccggtggcaacctcgactacatcgatgcccttttccaatccgctggcgctgccacccagagcgggttgaacacggtcaatctgaatgacctccggctttatcaacagatcgtcttatacctaatgacatgtctgtgcacaccgatcttcatccatggcgccgtggtatttgttcggttatactggttcgagaagcgcttccaacatgtggtcagtgacgctcgggcgatgcgacggagccgatcccgcatgggaaccgtgaccgatgatgggcgtacccaggagaataatatcaatcgtgcggagctaggagtcagcggtcgacccatcgtggtggtacgggaccatttaggggatgcccgagacactcgagtaacggacccggctagcaagaaaatcaattcgggcatgaacacaccggaactccggggaagcagtgttgaatccaactccgaagaaacggatacaagcagcgaacctcgttttggcctcgggagcttgaaggtgccaacccatttgaaccccgaacaccacatcgccttcttggaaaagcagcggaaggataaaggagcgttgcgcatcccgagtccccgggagtatgaccgtggtggtgcgcctgaggctttggaagaagacgtggaccatgaggagcaccctcagaatttgagtgaccatgacagccaacatagccccggttcaagctccgagcggctcgatcgactgggtccacttgaagaacagcacatcaccatcaacgaaccagatatttcacgatcccgtggtcgcggtagtacgttccctcgtctggatactcgccctactttgcgggagactaaagatgggaatgaggttaccacccttggcggtgctaacgcgaggaacacattcaggcaggtgttccggtctctgacgcaagagcgtgaccattccacccaaccatatctcagttggaatgcgacagtggctcgtaactccaatttcgtcgatttaacggaggagcagcgtgatgagttgggcggtatcgaataccgtgcactcaagacattggccgtccttcttatcacctactacgtcggctttcatctcatcggcatggttagcatgatcggttggatcatgacagacacccattggggagatatcgtccgggctgatggagttgggcggccgtggtggggaatctttaccgctgcgtcggccttcaacgatttaggtttcaccttgacacctgactcgatgaactctttccaaagagccattttccctctgctcatgctagggtttctaatcatcatcggcaataccgccttcccatgcatgcttcgtttgatgatctgggtgctttccaaattcacccgccagggctctgcgctatgggaagagttgaagttccttctggatcatccccgtcgatgcttcactctattgttcccccgtaacgccacttggtggctgtttggcattctcgtggccttgaacggcattgatctgatcttctttgtcatcctggatgtgagtttgttgtctccttctcttgtgcgacttccactgaccatgctttttagctcaacgattctgccgtcactatgctgccacccggaattcgagtcgtggacggctttttccaggctgctgcgacacgaacagccggttttggaatcatcagccttacagaccttcaccccgccatccaggtttcctatttgatcatgatgtatatctcagtctttcccatcgctatctctatgcgtcgaaccaatgtctacgaagagaagagtttgggtatttacgatgccgcagaggatgatgatgacgaagagacaaatgcccccacatacatcggagctcatttgcgacgccaattgagtttcgacttgtggtatgtctttttgggcctgtttatcatttctattgcggaaggtggaaaattgcagaagaacgaccacgctttccagctgttcactgttttgtttgaagttgtctcggcatacggtactgtgggtttgtcgtttggatacaccggcgtcaatacctccttctcggcgcagttcaatgtagtctccaagttggtgatcattgctatgcaactccgcggtcgccaccgtggcctaccatatgcgctcgaccgcgccgtccttctcccctctgacgctctcaatcgacgtgaggccgcagacggagagcgccgcatgcgccgtcgcgcatccaacttcagtggagttgggtctttcgcccaatcgcaatcgcaatcccagtcgaggaacgatcttggtcattcttcgggtatggacagccacgactggcaaacccagcctactcccaatgcagactctgtgatacatcgtccctcggctgtccatcgttcctcaactgtccaatccgatcggtagaaacgggcgaaaccttcatattcttttgttaacacctattagaggcttggcgttctacatacatatgccctggcggttcaatcttaatttcaatgtacacataattatagaaatattacttcctttgctgatgggataaaacttagccttgtgaccaatataacactgggtaattgtgatgtaatatagaatgtattccgtccgagcagcacattggtttatatgtccttgaaccttgcatggccgtactagtcgatgtagggcgacgaccaagcagactaggccatttatagtgaggtgatccatggatgcacaggcgggaaagatcggcgcttttccattttaggaacagagtaaatatccatgacgacaaactcgatagcttttcgaggatcaccagggtgtaatctaggcagtagagcatagagcccaactcatctccaaatccaactataccaaatcctatatgcagactatatcaatcaacatggacaaccaacagctaccatatctaaacggcgacagcggggccaacccgagcgaccccactctcgagctcaaatccccaatcatcaacagccaaccagacggagccggagacaccccagccaactctcgcccctggtataacccactcggctggtccctgctcgtgaaactcctcgtcagcacagcagccatagtaatcatcctcctggttgcaatcctagtcccctaccaaatagtctcaaaccgctacccaaactacatacccttgaactacaccctcgccgacacctactccggcgcaaacttcttcgagcaattcacctatttcacagacgaagacccgacaaagggcttcgtcgtctacgtcaacaaaacaaccgccggacacctgaacctcacctatgcatccgagacatcggccatcctgcgcgtcgacgcatcaaccccgaacacccgttctggtcggaactccgtccgcatcgagtcgaggaatacatacgactctggcttgtttatcttcgatatcattcatacgcccttcggctgtgcgacctggcctgcgttgtggttgaccgatggctatagctggccgacgaatggcgagatcgatgttcttgaaactaccaatatcggcagtcatgggaatgaggtttcgatccacactacgaaagggtgcaatatggatgtcaagcgcaaacataccggccaggcaatctttaagaattgcgacaattccacgaatgggaattccggctgcgcggtcatcggtgatgagtatacttacggagaggcgatgaacaaccgtggtggaggagtttatgcccttgaactccgcgacgccgggatccgcgcttggttctttccgcgtgtagctgtccctgctgatgtcgctgctgggaatccggatccgagtagctggggcgttgcgctggcggatttcccgagtacgaattgcgatattgcgacgcatttcaagaacttgagtatcattgttaatatcgatctctgtggtgaacttgctgctcagaagcagttttatgagactatgtatcattgtcccgcgacttgttcaagctttgttgcgaataatcctggcgggtttgttgatgcttattgggagtttaatagtttcaaggtttatcgtgcttattgagattagaggatggttgaaggcagggttctttttggcctaattttgctatttgctgggtgacatgattgggttgatcagaagcaaaaggaatgttttgtggcagcatgtctttttggttgtttgataggcttttgctgaaggagtttggtgtcgggatgtaccgtacgagcagataaatgatgacttttctttcgtgctatttgtattttcagtctgaatagcaaagcgctattgcataggagatcgacacaagatcagagatagtcgagacctactgcactcacgatggggcacgcgtagctgaatatcagacacgacatatccgtttgaatgccggatgaaaatagcagtcaatatagccagaaaattgagggatagcatttcatttctgattaaacgaaatcctagatatttgaagctcatgctctcgggtcgtcgctctcatcactgtaacactcctcgccattctcctcatactcattattgtcaatatcgccccaccatccttctccagatacttcgaccgtctcatcgatgcagtgcagtaatttcccagagaggtgtatagcccctccttgccaccagaagttagcgtgaagcggaccaatcagtgccttgaactcttggcagtatggcttgtcctcggcgagatcgaagtactccacgtctgcattgttgacgacgagatttagatcggtgctgatagtgccggaaaaggagtgtcgctctccatcccgggtctggatcaaagcatgtatccttcctttgttgcaggtgagacttcctggagatctatgctcctcgcgtggttggctagcggattctcgattcatcttgggaattgtttggtaatgagcaaggttgggatagaatttggtgttggtcagtccagtggtcttgtgcgttggacgacgaagcgggtggagggatagttctcggcgcgatgtgacaacaagtcagatggtgtgatgactcttctcagaggcttcgctggaaaatgaaagagatgtcagaataatcttggatcgaagtgagaaatgatgagaaatgacttcggaattagtgtcaaataaatgcgaaagatagatattcagtttcacttcattgctaaatcaacataaaatgggtatctctaacaaagatgaatcgtctgtcaaccacaaccggctatcaataattcatctctagatcaaaagacacggaatgcatcaatgctaacgaaattgtactcaacagccagtggcccaagagaccctaggtataccaaaacagaaacccgcaaaaaactcaatcatgatcatcgtaacagtacataagaaaggaaaagaaaacaagatgaatgaaaccactacagctgccgtagcagactgccatctgcaaagggattctctggagacatatccagcaatggccgtgtggcattgcgatcacccgttgcgacaccatgtccggtgcgtggattccaatgactagtagtgctggctgaatgtgccagcaaactgtttgcagtgaactgggcttccgggcttccttcagaagaaatcggggccgcgtatttgtttgagtggtgacggacgctgcgggcagtgttccgccgctgaggtgtggtgtccgcggccggccgtctccaagaagtcgcgggtgggatagcgattcctcccgggggctgatccggaccagtggcagcgtcgatcagttgcatgcctggttggactttcacgccgcgacccttgcccttgcggctatgctgcggtggctcgacaaagactggggttaggtcaaccagaggcttttgcttaagagatggggttcgagtgaaattggatgaatcgggagcacgagtcattgtgttggtccggctgttggggtttgagtcgtggccgggggtatgtgtggatcctccgctcataaagccaacgcctgaaaaggcttcttgcttggctcttttatcgcgatcctcccgttcccgcatagcattttgtcgctgggtgtaggttcggcctaggagtccggatggtgcaaaagcagattctccttcctcgggcgaagagatacctgaaatcaatgcctgtctatcgccgaaaggcccgtccatttcggcgtcgagcatcatagtctgggaatatgaaggtggagggggcacatatccacgaagagtcttcttccgagcaaagtactctttggagcttgtcggcctccgttgatcagagctttcgcgcctcgaagattcagccgaagtctctcgttctaggagtgggacttcgttgtacacatttctgggctcatgcgtcgatttcttcgtcccggcgcgctgcacaagtttctcggtctctgctttctgggctgctcctttcttgttgacaagataccaacttctccacttctgtactgcccggtaccatgtatctgcgatagacttgtcgctggtcgagaaaaagtgcagaaagttttcggtcgacagaaacatggatgatttttgctggctcttgattgcgaaacacagcttcttgggtggcttgatatccttgttcagcgcccgagcgctaggaaagtagatgtcatagtcggatatatggcagatattggtttcctcggtgtcctccttttttgagattgtcacttgtccatcagcacgcagagtaacataacgcttatcccacttgcgacgacgctgggaatggtaaatatggacagtcactggggatggtggcccactggaggcattcccagcatcgagctgagcgagggcttccacgctggaggggggaataacgatgaactggttctctgcatcgtgtgaccaggaattcataacttcccggacatgctcgtagcggcggaggggacgctctaggccaacttgcgagaaagactccatgagaatgaatctgtccgcatcaatgtcccgagataagtgcttagtggcatctagcaataaatcccggacttgagttgacggggtgacagtgagatccgcgacggcatctccatatctgacaacggcatgtcgctctccggcgttgacagcgctgacaggagcatcaactcctggaacgattccggttccgcccaccccgatgtatcttgggggggactcggttctcttgaggtggaccttggatcgggaaagtttgaccttctggaagaaagacttgcgatgctcatcgttcgatgagtgggaactgtgcggggggcgcgccgggacaggttccgatcggggttgttgcgccgagatctcccctccagtcaattgttccatcgcaccttgtcggtgcacctcacgtgcttcctcttcctcctcatcttgctccgccaaagggcgactagttgcggcccgttcattttgtcgtagctcacctcgctgctccagctgagtccgagcgtagcccgggattgcaggaggaggtgcgacatttccacttgactgtggccgatttcgatgatatcgagaacggctcctcgcgatcgaggggttctgctctccgatgctatgcacaggcgccggtggtgcggccatttcgacgtcgccagttgttgcacctggcattccacgataccgagagaacatttgaggtagggattgcgccgtggctgtcacactattctcactcatgttttggaaatttctcacttgaaattcgcccccgggggccgaggcgcaagagtttcgtaatgtgtttcacgttctatcgccaggataaggttagcgtcgccttaaaccaaatggcaatttcccgtaatttccttcgggtcgaagatcgaacggccagtgctgcgagtgcgattcgggttcctggaagtgtacagaaggtggaaaacacaattgagacaaatgtgggaaaagtccgcaggattcgactcaacacaaccccagtgctcgcgatcaaaccggcctgttctcaatcgaccattcgcgtttcgttaggggggaaaagcgacccgcaccgatcatcaattgggccggcctaggctggtgcatggggttcgctggctcgtaggaatcgatcgttggatcgatcattggatagatcgtatattgattggactcaccgaagtcacttggcatgcagtagttgatcatcgaggagttggagaaaggagaaacatgattgtccagaagttcaggtgggcaggtgggcagatgtcaggtccctgcccggttggtttggccaaacatttccggatccgacgcgccgcgtgcggtttcacgcgctgtcggagtacaatgtacaatatacgttggcctgatggagtatatatctatgatcgacaggtacggaggactattggcattgtattggcactattagattgttcaatggacaatgtgagattattattggatgatatctacggatccacaggacgatcagatctaagtgtctcactccagacgtgcttgctattctcctttctggttttcaacgggacttggcttttctatatttgatcattcttacaggcgaattgaattcggtcgatcttatttcctataagcacccatttcccggcgcctatgggttgttagcatagacatacaaacaaggtataggtacaccccggggagaacttaccaccacgcaatgaagtccactgttcgcacatcaatcccaagctcagtcaatgccttggtagacagatgtgtatcataaggccgtacgacactcgaattgggatcattgccctgcttattggggatcattccgggaatggccacacccatcaccttggccaacttctgacaaatctcatacttggtcatacggtcctcggacgtaaattgcaggatgtgagggaagtccttccgcttctccttctcgcgcaggtacttgatgacaatgtcccgacacacgcgcgccacgtcctcggtgttggttgggtaccgtatgccccagtcgtccattttcacgccggcgttttcatccgtagcctttgttactgcgtcgatgagggtgttgatcgcgctctccgagttattcttggcggtgccgtacagcaccggcacgcgcagcaccacgcccatgcctgaggcactggtctcttctaatacggccacctcgccatcacgcttcaattgcccgtacagattcggtggcttggtctcggcattggcctcgtatggtgcctcgccttcggtgccggggaagacgtagtcggtcgagatgtagatgaggaaggcgccgcgagcttggcattccttagccagtgctcgagtggcatcgacattgaccttgcgggcttgatctgggtgctggtcacataggtccggggacctgtttgcggcgcctgtgagctgtcagtctatgatggggtatcaagtcagccaattaactagcttacaatggatgacaatctgaggcctaggcatagttcaaaggtgattaatgtctataatcaagatctagatggaatacacatacttgacttcatcgaacagcattcggatatcctcctccttctccaggtcggccttcaagatagtaggcggggcagggcgggtgaatccctggccaacaaccaacacgcccgagtgctggaaggtgttgaaaacagaacggccgagcaagccactggctccagtaacaagaacgttagatgtcatttttgttgtagatatgggttaagggaggaagatggggaggatttcctttctgaaaccgcgggaccaactgtgacgtaactaacttctcccagtggatataacagtgaggacataattaagccacctatgtagacaggcaacacatgtggattcactcaattcgatcaattgaatcaattccagtcggttctgtgctttatacacgttaagatatgccatatgatactaggggtgtgtatatgatttcctatttgggctgccgctttaatcagactcaggctctcagagtagacatcagcacgaactcacagagcagtcacgtgcatgatgacttatactatgtaagacgggtgctcattggatgctcgctgattactcagtggcactctgtgtccaatcagtgaacaactctgatcacttagctttaagggaacagccccacaaggtcgtttatactgtgatgtttagttcgtaggtcaaattatttcaagaattttgcgtattttccttctggcaacaaaagagcccactttgtgcaatttatcgcaatgcccgaaaagatgcctcccttttgcaggttggacttcaagtcatttcaagactggaacggtgaccgtccatcacagatcctgatattccacaacaatgactcttcatggtggatcaaagttaccgtggattggtccttgccagaacaagtactaagtctgggttatttggaacgccggtccgtctttcgagaattccttaaagcgattgattttgtctaattgcagcttttggacgatactgtgacaaacattactctaaacttgaccgagcagagtcaaaactcgatcattatacgggatgggtatcaaaacccagcgaactcttcattactgttgcccattgaatgtactgcaagattgcggaagatccaaagagagtcatatacccggcgggaacgatctttaccaacatttgaggctcgctgtttgcatactgttgaggttatagctccaacagtctccatagttgtgttcgagcaacgcctgtttgcttataaaacgattggccgccctatctatgagcctgaaggcacgaaccatgtgttaaacgaaattgatgtccttgcacaacttcgcggacttccgagcatcgcgcagctagttagtctagttgtatcagagaacccatataagacctgcccgtcaaccgctatgccaacagtgatcacaggatttcttcttgaatactattccggagggtcacttgagcaaatttttgaggatgagtttcaatttgatactttgccagtacaatgggccttacaaattgggacagccttcaatacattgcacaaaagagggcgaactcatcttgacatcaagccgtcggatatcgttttggatgccaataaaaatgccgtccttatcgatgtcagcggaaccggtggttacgtgtgggaatggcgttcaacagagatgcaggttctcattcagcaaaacagtgaaacaagtcctgccaacacaccgtttgaggcatgggttgccacggatcgttaggcttatggaagattactttcggctctcgccgaaaaaagtggcacacctgggattggtagaagactgcagtctatcgctgatggtctgaccaaggcggcccccaaatctcgcatcttactatccgacgctctcgcgcaactagatgagaaggcgtagtattcgtccacaagaagcctgaaccctgcgagggtagaaccgtatacatcaactgccatttttttttccatttagccacctaatttcctctatcaactcgaaaaagacacctgatgaccgaagtctgtttctgtttctgttctgttctgttgtgaacctgccatacaggtacaaccagcaccaatctgacatgcccaaggcttattattgaaatatcgccggaggactgctgaggtatcagtcgcgcgggtgttgggggttccaatacggagctggaggctgggaagcaggggagaagggggtctttttgttgtcatcttgaacataaatctactacgaatcaggatactccgtatagaagtcaggatggaatgatacaaacttaggacctgcacgcgactctcttcataaccctaatggggccgagaatatacagccatgatacacctgtccaattttactctgagatcaaaaagcggcaagaggtgagcactaaaacagaaaggggacggtctcgagtgctaggcattatccggtgaatatgcaactatatttactgaatttgtataatattatctatgcaaactaccaattaaacaatatagactgctctaaatattctacaagcattgaatatagaaggccgaaaatccccgagacctgcgagctctcggaggcaaatcggaccatcggagtatctccacttgacattctcaaaattgttcctttttgaaatcctcagccatgtccggtgtcaggaacatcacagccgctttgcggcgggcccgagggccccgtcccagtctttctnnnnnnnnnnnnnnnnnnnnnnnnnnnnnnnnnnnnnnnnnnnnnnnnnnnnnnnnnnnnnnnnnnnnnnnnnnnnnnnnnnnnnnnnnnnnnnnnnnnnnnnnnnnnnnnnnnnnnnnnnnnnnngggtgacagaacccccccccccgcttggcggcgggcccgagtgcctcgtcccagtcttgctattcgcactgtccaatccatcacacctttgactgtgcgcaccttcagcgccagctccactcgctccgattcccgccagatcaagttcaccagcgacgcctaccccaacctcaagcgcgaccctaaattcgctgagatctctgcggaagatgttacatacttcaaggaacttctcggctcccaatcggccgtgatcgatggcgtgaccaccgacgcgaaggacgatatcgaacccttcaacagcgactggatgcgcaagtaccgtggccacacccggcttgttctgaagcccaagaatgcagaggaggtcagcaaggtgctgaaatactgcaacgaccacaaattggctgtcgtgccgcagggtggaaacaccggtcttgtcggtggttcggtgccggtcttcgatgagatcgtcgtcaacacttcccgcatgaatcagatccactctttcgatgctgccaccggtgtgctggtcgccgatgccggtgttatccttgaggctgctgaccagtacctcgccgagcggggatacctcttccctctggacctgggtgccaagggatcctgccagattggtggaaatgtctccaccaatgccggtggcctgcgtctcctccgctacggcagtctgcatggtagcgttctcggcctccaggcggtcctgccggacgggactatcgtggatgcgctgtcgactctacgcaaaaacaacactggctacgatcttaagcagctgtttatcggcgccgagggtaccattggcctcgtgactgctgtctctattcagtgccccccgcgtcccaaggcggttaatgtggcttacttcggtcttgagagcttcgaccaggtccagaaggccttcctcgctgccaagggccagctctcggagattctctctgcgttcgagctgatggacggtggcagccagaaaatggttattgaagctacgggtaacaagcaccctcttgagggtgagtatcctttctactgtctggtggagactagcggttccaacgccgagcacgacatggccaagctggagtcgttcttggagagcgtgatgagcgacggtattgtcgccgacggtgtactagcccaggacgagacccaattccaggccctgtggcgctggcgtgagggtatcaccgaatctctgagtcacttgggcggcacctacaaatacgatgtgtcgatcccattgtcggatctgtacctccttgtggaggattgcaaagcacgtctcacggaaaagggcctggtcggtgatgatgagtctttccctgttcgtgctgttgttggttatggtcacatgggtgactccaacctgcacttgaacgttgccgtgcgacagtacagcaaagaagtggagaaggcgatcgagccgtgggtgtacgagtggattcagaagcgccatggaagtattagtgctgagcatggccttggcgttgccaagcgggagttcattggttacagccagaacgagacgatggtgaagctgatgaagcagctgaagaacctctatgacccggtaagtggagcggcattgatctgtgtgggtaattgctaacatttatttttagaatggtatcatgaacccatacaagtatatttagagctaagtgcaatgttgtataggattggagcataacaaaagtctcggggccgagaagtaataattacattatgcacgagcatgtacgagcatgtccaacgcacaaactcaagtcaaataagtaaatgataatccttccaaggccatattggcaatgttagaggtaaatcccatcagctgagtggaccccttgcatttttaccccagttgctgcctgaggccagccgttgccatgtgatacggagcttgtttagggatggacgctccaccccttgcccgccattcccgatggcttctttactctcgtcttgacctcttggaagtcccaagctattcattcattacttggatgagccctgtcgacattccctgtctgaccggagtagctagctgggctgaattattgcgcgatggacgacatggcaagccactatcaggtgatggaggagctgggaagtgagttgcctaaagctctttttatttgttgcatttccgtcgctaaccgtaatctccgtttgcaggtggtagttttggggttgtttacaaggccattgacaagaccgacggcgagatcgttgccattaaacacgtacgcgctttcatgatcttcgatattcgagtttcaatttgtcacatctcgttcaattgttgaccccttttcagatcgatctcgagtctagcgaagacgatattcaggagatccaacaggagatttccgttctggctacctgcgctagcccctacgttacacaatacaaagccagtttccttaaggggcacaagctatggattgttatggaatacctcgggggtggctcttgcttggatttggtacgttccttgctgctattttatcaggggtttattgctaactcgccccagttaaaacctggatgttttaacgaagcccatgtggccatcgtctgcagagaactccttctgggcttggattacctgcacaacgaaggaaaaattcaccgtgatgtcaaggctgccaatgttctcctttcccagaccggaaaggtgaagctggcagactttggcgtcgccgcacagctagtcaatatcaagtcgcagcgcaatacattcgtcggaactccattctggatggcaccggaggtcatccagcaggctggatacgacttcaaggcggatatctggtccttaggtatcacggcaatcgagatgatcaacggagaacccccgcatgccagcacacaccccatgaaagtgctgttcctgattccgaagaatcccgcccctcgcctcgaaggaaacgactacagcaacacattcaaggacttcattgcacaatgtctgacaaaggacccggatttgcggccgagcgcgaaggagctcctgagacacaagttcatccggaatgcgggcaaggttgagtcacttcaggaactgattcatcgcaagcaggactgggatgctggccgtggtgaatcgagagacgtgaaatactatgccgagtctctcaacaacatgaccaggccggatgatctcgatgaggacgattgggtctttgatacaatcaaggctcctccaatgtggaagcctaagggcacggattggatgacattcgacgaggaggaggaggcaatgcctgatccagcccagatgctcgaggacttgcatataagcgcaccgccgccgcctaggcaccaggctaactctaccgttcgccgagttcctaccgaccggtctccgtctgtcaagcgggctaacaccaagcgtcgctcaagtggtgtcaaacaacctcttggtctagacttaacctacggcaacagcccgtctacggtcagacagttccgccgggtgtcagacaaagtccccactgatctgaacccagccaagcagggctatgatgagaatcaaagcccgaaaacggtgtctaccgatacttcaagcaaggaggctcagattggacgacgtgcctatagcaaggcagtgggaatgtcctgccaagaagtcctgtcaacaacaggagatggtgacaaacgtgaggcaatctccagactcgcagaggcctggagcgacctggaaatggtcgaccccgaaggcctctaccacatcgtcaggatcatgaacgagaagatccaagcagacccccgcctctccactcttctcccacctacacagcccgattccccctcgcggccacgtctcctgttggcccaaaacaacccacacctcaaaagccaccgtcgtcgccaatcctacgtccccgaaccccaatcccagtcgcccccatccatgcccgctcaagctgcacccggtatggaacacactaaacaactctccgacgtcctctaccagcgatggtcagaaggtctccgcaaccgctggggcggcatctaatctcaccctgaatcatcctcacgcaacatcaacctcagcacatcctcttactctttcttccattcgctgtatagtcccgatttggcgttctgacgcatgtacaactctttgccattggctgcatccttggtgtccgttcgttcattctgtttaccgtcgcttactctggtgggactggtcccggagtttctaatgatctggtgtaatatttttgcgctttcttgtgtactttctttgccccgatagaatgctgcttgtgcttctgtctttgtttattgggccttggtcttttgtgaatttttttcctaggtattctcctggattactagaacatacatgtctgaaatgtgacaaatgtcttgattttttcatcgcttcgcattccttcgatgtatctgaagctgtaactaagatcaagcaaacgccattcatactttatccagattcatccggtgtcaactcatccataagtttacggtatagcgtatgcagggcatgcgaatggggctctcctggtatctatggcggtcagccggctgacccgggagttgtggagagatactccgtacatgtggctgtcaactggaactgcgcagaagattgaagacgaatccagcggaatctacgatagcgcggatactggctacttgtatattgaagatgatgatccggataatgaactttggctgaagctctctgaccacatggacacttccatctttcttgtatatcaatgctgtcagtacattccctttggttcgtagcatagaatccgccattactcacgctagcaccagggatagaaacgaatgccaactgggcgatccaggaaggggaataaataacacagcacctacaaaacaactcagtcattcgtaaatccccaacttgacctaattccaccaccacattccgaacttgacttttttattaaaaataaacccaagataagatttaagatacttggatttatacttagctcatagaatctccaacttgatatcgcaacagtctataaaaacagtcatttaatcgatgattcagcaacttcatgaacgccaaggcctgtattttatgcatgagacccatatactgaagaataccagacaatttaaccgaaggaacaaatcggcttcactttaaaatctatggagtcattttccatttgagtcaaggtcccgctggtgaccccaaaccagcgggatcactccaacgccaatgggtcgcgataactgacgaccccaacggcaaactctccggccatagctgcttatgctgttatcgcaaagttactattgccaagcagtgactctaaacggatctgaaatggagtcaactataaaaagtacggcgaatcccaggttccccggaagagcagccagtcccttaccctacaccttgtcatataccttatcatacacacctctcccaagatgcgtccttctttaagcacgtggactcttttcctatcctacctaggatgcagtgtagctgctccggtactacctattctccctcatcatcttgttgcgcgcgacacccccttcaacagcagccttccgaacatcaccattttcgctactggaggcactattgccggctctgcttcctcaaacaccgcgaccacgggatacaccgccggtgcactgggcgttgatatccttatccaagccgtgcctgagctctggaacctctcaaatgtcaaaggtgtccaggtcgctaatgttgattcggggtccatcacccccgagattctcctgaacttgtcatcgctgatccaagaggctctggacgacccatattgccagggagccgtcgtcactcatggaacagatactttggaggaatcggccatcttcctggacctgacgatcaagacggagaagcctgtcgtcgtggtgggcgctatgcggcccgcaacagccatcagcgccgatggacccatgaacttgctggaagccgtcactctagcaggcagccccgatgcacggggccgtgggaccatggttgtgctgaacgaccgtatcgggagcgccttctacatgaccaaaacgcattcaaattccctagacaccttcaaggcagttgaacaaggctacctgggcttcttcctggataccaagccgctgttctactatcctccagtcttgcccaatggccgtgtgtacttcaacgtctcgggggccacggcattgccggaagtggacatcctattcgggcaccaagtactcaacccgaagctggctcgctctgcagtagagagtggagcaaagggtttggtcttggctggtatgggggctgggggctggacaaacgcgggaacaagtgagattgagaacttggtcaagaaatacggtacgcaagtcgtggtttccagcaggacgatggggggctttgtccagacagacggcactggaaatatgtacagtggacaggacttgaacccccagaaggctcgtattatgttgcaacttgctctttacgcaggatatggctctaagcagctcgccacattgttcgggtttgcatcttgagagcatgttcagatctcagcaatagcgggaggctacatagcaattcctagtcattagcgcttaggtatatagtatataaggataaattcatgtataacctgacctctcaccgaaattagagccatatattcgtaattactggctcatccttctcacaatggcactgccaagaattgagctgcaatacgggttggttcgtgccctgctcagtaggatttagccgacagcagagaaccccacggcaaaagatcgttccaatatttggtgtacgcccagatctggtaatgattgaccaatgtggattatctccaactgagcttatcgagaacagcacctccaggtctgggcaagactgggcattgtcagcaattgtcttatctgatgatacccagtggggccgtggaataattcgcgttatctactccatatgttgtacatcttttacgtcacaatttcacctaatcatgatccaattcaatgagccaatgatacaccgggtatgatggagtatcgttgaaaaatcgcagttataccagagggcataggagcattagatgtaaggacataccgacgtttttagatgtttgcctgagatatttgcctggtctgtcctttagatgtatatgaaggcgatcataagtataaactgtagctactccgtcaagtccgtctctatgtctagccgggcaattgaaagaggccgaaataagaaggtgggtccttcccgagaccagtctccacttcaaaccttgtaatatcacggacgggttgctcttctgggccacgactgtaccgcagaggaacagggaattgattccgaaggacagatcggtacgggttcttcgttatggtggaaaaggaggccttaccatctgtcttgaactcggatctgaatggtttgtttgtctagtttatgggaaataggagctagacgaatattatagagctcacggataattgcaagctcctagaagatgtacagagcaggatgttgctatgcatgtcaattttatcataattttaaattaaaggtccatgtaaactaagctaagtaggatggtagtaaaattctgcagtcctgttgcttgaagctgatggactgattatcatttgtgtggttcaccgccaaccattagatcaggatggcatctcgattcatgcattaatcattcaaactgttttctcatccttgtcgttatgtttggccacatcgttacattttgcgtttcgctttggatgggagcgcggtcgttgtttcgattcatgtgccgcgctttgagctttggaggctattgctttatccctttcatccagacgagcacgaagttcagtaaacatccgctctaccccatctaactgctccgtttcttgagccttccactcggcggattgaattcgatctggtatcgagcagaagttcgtttccgcccacccacccaaaaatagtagccaaccgcccgacaatttcctaagaggaaataaccagtccggcttgactttatattcaatacctttggcgtataacaatcggacatagtcgactaattcgcgcttcatctgaagcagtgaatcgaggtcaagcttcgcctcatagatacggagccgaagtggcgtccagataatcttcggcgaggcctgcacaatgataccagacttgagatcggcacgtatgatacgtgggtggccgattggggagcgaatctgaaaaataatggatagaacagagtattcacgatataacccagtaaagcagtcgggatggaactagaagaagatcatcaggggttaataaggatcatccatcgatagaacgagccgaaagatgactaacctcgcaaacagtccacctttcttttttgtgcctagacctctagatctcttgacagttcgtccctcggcagaggtctcgaggacctcccaatctttcgtgttacggataagttgagatatggattgatggggtagacgatctgatcgctttcgttttggccgtgatggaatttgctgtggttgggccatgctcagcggctgctcttctgtgggtatcgcttgcatcacggtattgacaatagggcgatagatggatggtggagagcgaaggtggtttgtgtgggattgggatcgggactggattattgcgagacgcggatcgcgtcacgactttgtgtttcgtaggcctcaacgcgcctgatattcgaatgccaatttagtaggcaattcggtgccactttagccgattaacaaccgggcacctgaactgagactcgagctgagtagaaatatggatatatttctaagaaattatgtttaaaagcgattctccatccaatcactccaatccagggctagattgaataacaaaaaaacaagtgcatcatccgtgaatcgaacacgggcctcgtcgatggcaacgacgaattctaccactagaccaatgatgctgaggcaccaggcggatctgaaagctgattggctggttatagtataatgaatagaaatggaatcaagaccctaaaacccagagtatacatatctatcatgacggtcatcgacacattgacctattggattaggaatgatgaattcagccaatattcacggtcattacagaagcaaaaacctcagaatcaattcatggatggattgattatctctggctacctaatttccgaggtattaacctccagggctacttcgtggcttttgaaaagaagaaagaatatatgatagaagggcatatacaatggtataggattcaaattcgatgatcttagcccggcaaaagcgatttctgaatgttgactatggcattctattccttgtctgatcctttcaacttgtaatccaacaggcctttgattgagttgagtttgactgagtgaagctataagctatgtgaatgtacttatacagagctaaacatggcatacaaatagaacgactagacatgggtgttatcgtcgaacacatcgatatcctctttctccgcaggcttcgtcttccgggacatccactcatgacgcaagagccccagagctgttggccggtcttcaggatcccattgtagcgcttttcgcatccactgcacgaagccttccacatcctcgccatcaacattgcgagctatcaggctctccaagcttcggtctggtattggagcttggcccgtccaagtcccttcttcatcccagaacatggagcctagtcgtgtcttgtcgcggaactctggtgcaggagggccaagtagagcaactagctctgcgatgtggacccggtcgtcaaaggctccatctgagtttcgtccgtcaatgagcccctgggaactgatgtagttccatgcctgaataaactatgtaagcgtatttccttttcctcaaaataaagtactcacaacgacagcagtaccccaaatttctgccctgtgatccgatttcgatttcaggacctgttcaggaggcctgcaatgcttctcctcgatacctgacatatcatcgcctgggaaatccagacgcaggggaacaccatcgcccgggagtatcattggggtgagaagctcgtcattgctgggtccagcaacttgtctgttgttggaaacgttaaatgttgcgtttggcattatgcctactctgaggatcagtcagtcatcccagaaacgatggcgagtgaagatacgggcagtaagataacagtctgtgtgcaggaagtccagcatgaccagtaattgttttatagtagacttcgtcgatttgagatccagcttgtctcccgcgtgcatctgtcctgggtctagcgagggtgcctcgtggacaacacaaatatgagggccgcgaggacccttgatggaaaagcggtcgctaacttcgtgaagagggcactcgctttgctggtatgttttcggtggattgagccgcccataaggcttgagcatatggtccaccacatagatctttaaaacaaccattcttggctccctgttgttaagtgagacttagagcagtatcgttcgggctaaatgagacactcacgtcagatcaacagcataccaaaccgctgccgtgggcccatagccgattttgtgtagaattcggtatctgtcgttcaaggtctcttcatcctccacgggatatgtgtatgtctcgttgggctcatatcccgttgcaagctcttcctcaattttgacagacgaatccagtagcccaagatcaaacactggaaagactcttgggttggatgtccactgtgatgagcatcggcgcgaccaggctgtttttcgatcaaagggagagatcagttggtacgtggaaatgggaaatggggaagaaatcccatatctttgaataagccttgtgttagaccaaacacgcataccactcactctccagttcatgacgaagatgcggtggttaacgaatgcgcttggttacggagtaggtacggttgaacgacggaggacgtgtcacccctgcatatttccgaggtctatttatatctcgaccggtgttttctttgatcatataaagagggccatcaccgcaagcatagaaaaaaaaaacaattcttagtatgtcgctacggagaataagcctaaacagcattgtctatcaggccccacaaaatttgaagtagcgacgtgccccataggttgaagtcaggctcgatctggcacatgaagctagcaggtgtacactagtctagacataactcaaacctacacgttatcggctacggagatttaaacccctcatgtattccgtgggactcgtcaaatggcaatgagagccacgactccaggaacgtccacgagaaagcccggtttgatatttgttgctgacctacatggacttccacaacacggtaatgttgatgtccctgtggtaggtgaagcagcatgtgctacaggaccctctgcctgtgctgtctcatgtgggctacggagagatggtggtcagagggatggggagaggaagaagagaagagaattggggggggagaggtacccttttataccccaatcatatgggttcgtgggctttctcaacaaactatgcaaacgagaatattactcgcttgtctcgcttgcctcgcttgcccagtatagaaggaacgtttccttctcatctgggcaagtacgatcaccggtccaccgtcccttcctagttcgtcaccgttgggattctcgcctggcttctctttctttccttctctgtgtttagtcgaacaaggtgccttcctggaatggacaccttcccactttcctgatctgtgagtcacttgcaccttccattgaagtacaacaaagcacattgttctttcccaattaagttatagacacggtcaactttgtataggggactcgtctcgtacgagaagacacaacaagcaaaccccgggtaaacaccgcaatgcttcggtcttccaggttccaaggtcagccttgactgttgatatactcctgaaccatgactacaacagcactccgtagtagatctaggcctcggcatacgccaagactccacgaaacggcttaataacacgctaaattaatgcctttaattcccccctgaaacaccgcctcgtgcgggacccgctgtaggctagactcaggagactcggagctattattttctcccttctcaactcccctgctcttcttgttgttcttgctattgttgttctttttttttggtttattctcttatgactttttgaaatatcttgatctctcctactggctggcccacaatggagagcattccaggagcggagagcctccttgacggtccatttccggataaccagaattcaaatccgccacaaccggactctgcttccgagcagttctcccattccagtctctcacgctcatcgtctgtcgcccagaaaagaatatcatcactaccttgtgccaagacggcccgccatgccaaacgcctcaccttgaacttccctatcaatccgaacgaacctgagacatccgatcttatcagctcacccggctctataaccccagttacacagtcttcgactcgtccctcccccgctcagcccccgggaattcctatggcatttgaggtcccggacgatggctatgacttcctgcgggccatcgcctcgcaggaacggaaggtcatggagctccgcgaggagctcactcgagccgaagcagacctagtgacaattaagaagcaatgggcaatgtcggaaaagtctaggaagcgggccgagatcaaccacgcggagccactcatgcccctgcgggcgcctgatttctcaacatccgaggcttcaagttcacatgcccggcaacagagcatgagctcagttacaagctccacggtgtcacaggaacggatgagccgggatctagatcgccgatctagcgtgcgtgctgctgtcgccgccgcaccaggaaccaagattgggagtaatggtcggcgcgtgtttcacggcacacatacacggacgttgtctcttttgtcgccagtctccggtcccagcatgtcttcccggggagaactaggtctctcagatgaacgcgtgggccgtactccgcgatctgcaacattaccatctgtcgagcgcaacaatccagctttgatgaatgcacaactagacgagagccaagtaccggaacatctactcgcacagtggcacaagacccttcctcccccttcacgcgaggccttggtacgcacaggcaagcaaatggcatccgatctccgcgagggtctgtggacattcttggaagatatccgacaagctacggtgggcgaagaaggaatcagtggcacgcaaacaagaagctcaccatccagctcactggcaccgccacatggtcgcaagcgggattcgttggcatcacggagtagagaacggttgatggcggacggcaagctatcacgatcatcatcgtcatcgtcttcgcgggggaggccagcggccgagacaaaaactggtaaagacaccaagccggcggaaatttccacatctttctggaatgaattcggcattgatacacccgctcagaagtctccgagcgctacgcgcaccccctccgacaacaaagccgccaaccgaaacgaggcgaccgacgaacagcgcgatcaccgctcgagtaattcgattgacgcacaggatgaagatctcgacaactgggaaagctgggacacgcccctatccgggcagaagacgcacacgccctcatcgagccgatccacagttgcatccaaacacgaccagtcacctattacacagggtagcagccctcgaaccagcgctaggtaccgttcgaccttttctgatttcatttatgacaacctcgtcatgcgctgacacgttcctagctttggcgatttgaacccgacttctgcacttaatcctagtgtctccgaaagcattccctggcctgcaattaccaagctggctccttccaagcttcaacgtactgcatccaacctgatggcagaatgggagcgctcgctgtcgccttctccggatcgagcttcttcttcttcttcgctcagccgtaaggacagcaagaaggactaacaaagttcctgctttcctttcattgtatatacttgctacctcttcttcggccctatctacggaatcacgtagggctacgaccttcgaattataccatatgagagcgttgcttcttctgttgtcgatatatttcctttcctttgctgcctttttgaagaactctacaggcatcgactgctttcaagattgttgaaatacgttggtttgattacaaatgccatttttgcttctctagcttcacgaatacaacgagtttttatatgtcttctttttgcgtctttcaacgtcaaataatgttttctgttcctctatctatacgtatgatgcgtaccgataacggcgagattttgcgggccggaacatcacgtgccgaactgcgctttagacttttctagttccccgtaaaataaatttgcggttcagttactcgcctccgcaagatctccgcgttctgtatattacttgctcacgcggtttcttctctcgccgaagttcagtggattgatcattcaggccggcttggatccaatctaacaagtgcgatattcagtccaaacctacccgcgtcagccttcaatatggcgtttccaggcaccaaaggcacggcgatcccgatgacctccctgggaggtaactcgggcaccgagggaatgaatgatcaagaacaggctatgatcaagatggttcgtcctcgatcctgacctgtattccgtctaattctaacaaacttcggtatagatgcaacgtggtatggagtcctgcccgatcaaaacagtcatctcgggtaccatgggtttcggtcttggtggtgctttcggtctcttcatggccagtgtaagttggaaattgaatattcgagcactgtttcatatctaacatttacccgcgatagatgtcctacgactcgaccttcacaccccagggccgcgctatcgccgacctcccctggcgcgaacaagtccgccgcggttttaaggacatgggcgcccgctcctggtcctcggctaagaacttcggtatcgtcggtgcgctctactccggcactgagtgctgcatcgaaggcctccgcgcaaagaacgatcttaccaacagtgttgccgctggttgtgtcaccggtggtattctcggcgcaaaagctggtccccaggctgcggccttcggctgcgctggctttgcggcgttcagtgcggctattgatgcctacatgagaatgcccggtgatgagtaaacgctcgattcggatccgacgcgaaagcacggccttgtttcgtcgcttggcgcttttgttgccagtcggctttacctggttgcgattttccacctgtacattttacagcatctggcgttctggaatagaacggaagcattgcgggcgttttcggttgttcttgtctattttgttgggaggatggttctccggcctgtctcctttgcgttgcatgtcttgtttgagcctgctttgcatggccttggcatggtggttcacttatattagatccttgcgggtctgactctttactcttttgtacaatactaagcgtggacatacatacaccactggccttttgagactcacctctcacaattgataccaaattatttatgctcatattattcattaattatgaagagcctccatgaaattcctcggcttattcaaatatccgatttgggctaaatctacgccgtccctttcctggcagaccgcatactatgcccgtgccaaatgcaaagctaaggagatccattcaatcactataccacgtcccaatttactactttaaagttacaagacctgacaaaaatacagtttcttcaatttatacacactcctaaggcaacacaatatacttctccaggtgcttaggaatggaaccacgcaggttcttgctctcgagccaggtgctagaaaacaagcgatccgcataccggtaagcaccgtcacagagaatggtcacaacggtgttacccttgcccaacttctccgcgatctccttggcggccaccacgttcatcgctgaactggcaccaaggtacagaccctcctcatccagacagcggtaaaccatctcgatggtcttctcgtcgctgatgctcacggatccatccagcaagccaatatcgggctgcaggttatctgttacacggccttggccgataccctcagtgatactgctaccagaccggtcgatcagggtaccaccgctttgaatgtagctgtggagcacactgcccggaggatcggcgaggaagctcttgacgcgtccgtcactgatggtcttcaaatagcgcgtggtaccagccaaggtacctccggttccagtggcacaggtaaaggcgtcgatcttgccctcggtctgtgcccagatctcgggcccggtagtgtcgatgtgtgcttggcggttggcaatattgtcgaactggttggtccagactgcgttgtccaatgactcggcgtgccgacgcgcctggtggttgtagttttgggggttgtcgaaggctactgcggggactgggtatacctccgctcccagcaggcggagcaagtcaatcttgccttgcgactgggtgttgggcatgtagatcacgagcttgtagcccttggaccggcacacatgcgccagtccaatgccagtatttccggccgttccctcgaccacggtgccacctggttgcagaagtcccttctcctcggcatctttgaccacgaaaagcgctgctcggtccttcacgctacctccggggttttggaattcggcctttccaagaacattgcagccggtctgctcggaaagcttcttcaatcggataagcggggtgtttccaatcgctgtagtataagtcagctaaaagtatatgcaagtgtgcgctcggagctagacataccctcggtcaatccattgacaacgccctgggcggttgatacgcgggtgcagtaggcagtggatccctcaccagcagcacgagccgccgtggtggcaaaccgccggacactttgacgaaacatcctgaattaatgcaatgcaggaataaatggtcccatcgaccctcggggaatgacgagctcccgcacctccgatggtcggcattagtcagctcacgtgcgtctgctacccttatcgggctatcggcctcccgttttgggctgtttgtttaccgccaaggcctccactcctttgatcggtcccgcagtgcggtgcttttcgctttcgaataatcaacgtcaacaacaacaccataatgcctggcagagtcgccgcccgttcgacatctgcgacaacacgcagatcgtcagcacagccctctgcgtctgggcgtgctggctccgttacgccatcgtttgcgatccccgaagaaccaacagagccaacatcatcccccactttgcgtcgcgatgtgtgcttgatctttgcggatgctcagcgctcaactactggacatcgaaagcttgttgtgcgcctgcgcaagcttcaggagttttgctgtggtatctcacaaaagaaaaataagggaaaggacgaagagcccgaggaggcattgattgctggtgaggaaacggaggctgagaaagaattcaatgtggaagttggccgctgtatgcttcggattctcacgattaagaaaagtgagcctgttggagaccgaattgtacgctttttgggtactttcctcggccatgccgcggagaaagataatgagatctttgctgcgggtgaagacgaggagcacaatcccgacacaccgacttcccgcctcacatctagtcttattgcgctgatgaaacctgttatgggcgccaaggataagatggtgcgcttccgcgcaacccaaattaccgcccacattgtgaactctctagaatcgatcgacgacgagctataccatgctataagacagggccttctgagacgcctccgtgataaagaggcctctgtcagggtacaggcggtcctaggcttaggacgtttagcgggtgatgatggagagggcgacgacgacaactctgctctgcttgaaaagctgatcgaaattatgcaaaatgatacaagcgccgacgttcgcaaaaccctcctcacaaatctccctctcgctccagtgacgcttccttatcttcttgagcgcgcccgtgatctggatgcccctaccagacgcgcgttgtactcacgtcttctgcctaccttgggtgacttccgccatttgtccctctcaatgagagaaaagctcctccggtggggtctacgtgatcgtgatgaaagtgtgcgcaaggctacggccaaattgttttacgacagatgggtcgaggattgcgctggtacgaacaatgacccgaatcagggaccgactggccagcgctctgcacccgatatcaacgcgcttcttgaacttttggagagaattgacgttgttaactctggaatggaaagcggcattgcacatgaggcaatgcgcgggttctgggagggccgtgcggactatcgcgaagctgttatctttgacgagcctttctgggagaatctaaccggtgaatctgccttcttgctccggtccttcaatgacttctgtcgcgtggagaacgaaggcaagtacgagagcctagcagaagacaagatgccagaggtcaccgcgatggcctatttcctaggcaaatacatcactaatctcttggagcggaagaagatctccaaagagtctggtgaagcaaacgatgatgacgcagtcgagcacgaatttgttgtggaacaattgcttcatatcgccatcactctagattacagcgacgaggtcggtcgacgaaagatgttttcgctcctgcgagaaactttggccgtgccagaacttccggaagagagcacgaaacttgtcgttgaaacacttcgctgtgtctgcggacctgatgctgcggctgaggccgaattttgcagtgttgttttggaagctattgctgaagttcacgacaccatcaccactgaagatagctttgtttctgctaggtctgaaatcagtgatgacgctagcagacgatccgaaactccgggggttgaagagattgctccctttaataaggaagaagccaaggccaagatcgtccgcgagattgttgttaatatgaagtgtctatatattgcccagtgcatgttgcagaatgtccaaggccacctgcagcagaacatgaacctggttactatgctcaataaccttgtggtgcccgctgtccgcagccacgaagccccaatcagagagcgtggtctcttgtgtttgggcctttgttgtctgcttgacaaggttggtaacttcccttttgatggaaggcgaaattcgctaatattgacttccacagaatttggccgaagaaaacatgaccctcttcattcactgctatagcaagggtcatgaggcattgcaggtcacggctttacaaatcctctgtgatatgatcacgactcacccatctctcctcgctcccgttacacaggctgacggcgagaccgtcacgccgccccccatgcagaagcctttgctcaaggttttcgcccgagctctgcgtgccaactctcccagcagcgttcagtctggagcagccgccgctctctgcaaactgctactgaccaacactttcactccctctggaccgaatatcccacccgcaatccaggaacacaatcagaatgctgttgaatcccttttgctatccctcgtggtctcattctaccacccacgcactcgtgaaaacccagctctaagacagtcattggcttatttcttccctgtatactgtcattctcgtgtggaaaacacgcaacacatgcgccgggtggccgtaccagtgattcgtgccgtgatgaatgccgcggaggagcactactcacttgaggccgaggaagacagtgatggggaaatcgatccgagcgtcggggagcgtgaggtcaaggctctcatggctggtgtcgttggtatgctttccgagtggactgacgagcgccgggtcgttggccttggcggtgaacgagttctggctggcggtgctgcaagctccagtgtttgtggatgggttcaccttgccctagttaaggagattcttgagcgtgttctcggtgtgagcgctgccgcgaatcgctgctcacgcgaggaacggaagctcctattctccctcctcagcaagctttactttgtcgctccaacggtgcccgcacgagctagctctcgcgttcccgagggcgatgatcaattccgaactagcgttcgcagtgcgacaggggtcgaaatcgatcctgaaaacattgccctcgcgaccgaggtcaaggagctattagaccaaaccattgaagatggtctcgccgccgaagcctccagccgaaatgctttagtcaaggccaagaacgccatcctcaaaatccttgccgttgcacaagatggtcgcgctgctagtgctcgtcctcgcgaaggcactgaagatcccgagaatgatggagctagtgtacgctctagtagtgttcgtcgctctgtggaccctactggtggctacagccgtcgtcatttctctgttgagccaagcatcatggaggaagacgaggagggtgatagccgtcttacttctgctacggccaatcggcccattgtttccattgaacctagtattatggaagaagatgaagatgaccatgatactagtcgagggacaataatcaaggaagagacgggtgatgagtgatgactgttctgagatttttggttggcgtttgaagttagggatttggggttaagtttctgtacatactttcagtttctgtttttcttcgaatacctttgcatacgattatatgagctatctgagttcctcatgctttgtgcatgttgatgtatatatccacgtgatgtgccacgtgattatgttttgacagcggctgagagacttgacatttggaatgtccatcttgtccaccttgtccttccaaggttgtctatatttgtctcggttctcgctatgtttcactgtatatctatctatacctaggtacggcgtacatctgtcctacctggtaatcgcttttgacctttgtgcattccttatattcgatacatatcctacctaatagttcaggaagtgtccaatcacccaccgtattagccattccctagctcgagacattaatagacatgcatctatatactagtcctacttgactcgtctaaatctgacaaggcgtactaagacagggatctgggcccggttgggttgcacggtcaaaaccagtccgaacacacaatttccaggggaatttgaaggatagcagattcgatgaaagtgagagagagaataaagaagattaatttctgaattcctcaagaaaaacatctatataattcgttttgtaattgtataatctccgtctccccccgtgagccccgaaacttttcattttctcctcaaaactccaccgagttggctcttttcttcttctcccccccccctttcccttctctcctcccccgggctttctcttctattcttaccaccctcttctccggccttgtctttgtcttctgcttttcccgcagagacatcttccccatcttccccccgggattcccttgccgctccgttggcaccggacaagtcagcgatggcggccgtttcagcaccaacccccaagctggatcgatacatcgtcatccacgttgcaaccacctgcgacgaacatggcgtatatgtgaccaaggactcggctgaggtcattgagttaggctggatcttgttggacaccaagacctgcgaggaagtccgttccccccagtgtcttctacccaacatacaacttactcccgagaccatggaagctgacatattttttccccaattgtttagttgcaccgcgaaagtgttctcgtcaaacccgtcaatactccaatcaccccgctttgcagtaagatcgccttgaaaacaaccttggattgcattgggttttgctaggaatccaatttgtggctgacaattctctgaagcgagcttgaccactttgacatgggaacacgttcgctctgcaggcactttccgggacgccatctctcgattcgacgccttcgcccaagaacacctcattagcaaacacctcgagtttgcttttgtgactttggactcgtgggatctgcgggtgcagctgccccgcgaggcccgcgacaaggccgtcgtgcttcccgcatacctgcagcactcccgtactttcgacttgcgaacagaatatcagcgctggcagacgcaccaccccgagtcgcttcctttcggtcccagctcgctctccaacatctgcgctgccctcgaggtcgagcccgttcagtcgtccgccccgattaagcacaaccttcctttccatttgcaagctttggcccccgcttcgccccgccgtgccatggaggaatctgttactctcgcccgtgtgcttcgtggtttgattcgcaagtcgcagccgccccaggaacaccctgagatcctcactcgtcctatggatgctcatgccgacgttcgggcctttttggcggaacggagcaaggtcctgcaccttagtggtctgccccacgataccactcagtctgagttggagagctggttcactcagttcggcggtcgtcccatcgcattctggactctgcggacgccagaccagcacaagcccactggaactggctttgccgtcttctcttcacacgaggaggtgagtttgcatcttggtattcatttggctgttctacgctacagaacttcctgtgttttatccttagtcttgcctactaactgtttactaggctgccgaaagcctgtgcatgaacggccgtgcgctcaatgaaaaggcgattgaggtctctccctcttccagtcgggttctagaccgggccgccgagattctcactcctttcccgccctccaagaaccgtccccgtcctggtgactggacttgcccgtcttgcggcttctctaacttccagcgccgcacagcatgcttccgctgctcgttccccgccatggcggctgcacccgacccaatgaactacggaaactacggctacggtccgccatcaatgatgcctcctcacatgggccacggcggtcacggtatgggtggtggtcactcgcgtggtatgggtggcaacggcggcgttgtccccttccgcgcaggcgactggaagtgtggttctgagggctgtggctatcacaactttgcgaagaacatcaactgtctacgctgcggtgcccctcgctcgggcgctgccgtcgtggcagactcggcattcccgtccccgatggatccaccgtcgcaatttaatatggggcccaactcgatgactagcacccctgcaccagctccgttcgcctcgaccgccggtggattcggtggattcggtcagcagtttggtggcccgcctaacaactacgctctgccctcgggtggcctgggtaacaacacccccggtgcgtaccctcccatgggtcagatgaactcgggctacggctcttccggcacctcgcactccgccgcctcgttcgccaacccggccactcaggctgctttcactggtgcggaccacggtgttccatccaccagtgcttcgaacggtgccttctacggtaccgatggtgctagcgaccctttcgccttcttgtccagtggcctcggtggtctgacagtgtctgacgacccccactctcgtcgcaacggctccggtgccaacaagtcgcccgcttaaatatgggtctagttgtacctatttcatgccccactcacgaactgggcgctcacgcttatgttgtccatattgcaaccctgcattgtggcgggtttctgcgttggttgatattggttgatacgcatttgtataagggattctgcggttttggtgcatcgggttggaaggagcaggcgggttagcgttgtcgaagattttcggatttctttctctctcgccttcgccgcccagtgctttttttgcgtgatgccttgtttatcgttgggtttggtctgttttttgttttttttgtttttgttttcctttttcttcttcttttcccccatatttgtgattttcatcttgcgctatatggttgttttttttatcgagggcccttataggggtgtgtggtgcattgtatttttcgaatgttccggcccatctctggtttattgtctgcaggcatggacacatttgcgttgggtttgccctgcttttggcattgcattttagatattttgtggctccctttctgcactctttggtcatgggaagcgtcggagaattcacggtcttgatctgggtggggatatactgggactccgtttggggtgttggggatttattttgaagcttgggcatcgaatggaggatctcttcggggtcgaagcactgtgaatgcaaaaaaatcattgtgtctatattttcatgtgtattttcatgtgtattctgtttatttgggtctttcgttaggattatataaaattctagcagatcgggtgatatatattgaccagtacagagtacggagtacattataacgtcttagaagtgtactattcgacagattttagtgattcaaggtgaatctgagaccttttctttcatgacaacactgtttaatataaagatgcattctcattacaagattgttggtcaactgctaggtacatggagttactatggtgcgtccatactgaacgaaagtaccgcgagtattagcgctggaggcagccgtaggctttcgcgtccaccgcccggaacccgtcattgctccaacccaattgacctcagctacttgacactccgcgttgcccttattctacctcattgcttcctttgaacttgttgtttacagacctttaatcacctctaatccagtcctccttgattcacaatgtccggatacgaccgagctctttcaggtaagctagctccccacgtccagctccctttgctcctgttcaggacgagagctgtatcatgctaactcatcgcagtattcaggtatgaagccttcaagctacacttcagctccagagtttgttttctaaccctctcccagtcctgatggacacgtcttccaggttgaatatgccatggaggctgtgaagcgaggtaagatcgccgtgatttgcttccctagcagcttcctctgccccattttctgctgtcgctcccattctttccatcaatagacataatttgctgatggtagatgattctaggaacttgcgctgtgggtgtcaaaggcaaggacattgtcgttctcggttgcgaaaagcgttccgccctcaagctccaagatacccgcattactccctccaaaatcgccctggtggataaccacgcctgtctcgcctttgctggactgaacgccgatgcccgaatccttatcgacaaggcccgcttagaagctcagtcccaccgtctgactgtcgaggaccccgccagcatcgagtatattacgaaatatattgctggtgttcagcagagatacacacagagtggtggtgtgcgtccatttggtatcagtacgctggtggttggatttgacaagaacgacaccatcccgcggctgtaccagactgagccgtctggaatctactcagcctggtaggtggtttgccagcctacgtctcgtaatggatgaacgctaatctcttttctcattacaggaaagccaacgccatcggtcgttccagcaagaccgtccgcgaattcctcgagcgcaaccaccaggatgacatggaccgtgagcagacaatccagctgaccatcaagtctctgcttgaggttgtgcagacgggtgccaagaacatcgaggtcgccatcatggcgcccggtaagactattgagatgctgccagatgaccagatcgagtcgtacgtgaagaacatcgagactgagaagcaggaggaagcagccaagaagaagacccggacagggaccaccacggcggctattctcacccggccgggtggcgccgagtcgaccgattaagtgcgaaaggattcagagcctgagaggtgactggatcgttgatttgtttcaatttacagtagcgttgggtcctttccttgacgagaatccaaaatcatgaagtctaaaacacatctccacatgtgcaggtttatttcgtattgtatattgtacaccaaggcagaaaagggtattggtgccaaggaagttttcatctgtcttgaactatcaagaaacagtaccatcaaatcgtcaacatcatgaaattgcgccgtccccgctaattgtcttcccacctccccacccccaatatacacagtttagcccatacggtcggacacatctttgatagtgaagagagagcgctccttgtcgcgcgcaacacgttcgtccttgagcatacttgatctggtcagcatcctgccaattagaagattgtgctcgacataccggttgtccatacgagcgtcctcaccctcaacatgtagtcgcgcctcgggctcgcgtgcctcaatgacaaagtgattatcacagtaagggcagtattcgtcactaaaagcaaattagcctgctgccacttggactttgaaccctttcttgcatacgtctcgtcgaactcagcagcgtttttgcggaaacacttcttgcacttcttgcatgcaaagatctaccccatcaatgtcagcctgatagacctgcgctagccggagaataggggcgtaccatctcgtcgctcttctcgagcgggtgtgactcgctctctcggtggcattcggcgcagtcgaaccattttcggcctagatatcctcagtgaatcctgtgtcatgaaatacgaggtcgatttaagcgtacagcagtgcgagcggatggatacttgagcgttcagaatgtgtttactgcggagcggggtgtattagcaatcggattttggaccagggaaaggaatcacgagcatgagcatgctccaggatatcacgagaagcagacttaccacatggctatgaaatgcgaaagaaaaatgacagcaaagtgctagatgtcgatgctcaagtccaaagagacgcggacagaaagtgatcgccaactcccgtgattccctccactttcctccccgccacccatctcatcaagttttgcctttcacccccttttaaacccctggatatccctcggaattcctggaaatattgacggtcaagcttcatcttctgttcctgggccttttgcgccgcttacgtcgtctccttgctccataccccgagccccacgacatccctgtagcctcagttccgtgcccacgaacatttactctactgcctccgcgccactatttgacacccaacatctacaagtctatgatccattctttcagctggtctcggcgacggatccgtgataatggctatggccggcacagggaaacagccggacaacaatgatgacgctgctcctcccactgtatgcatacgtaactgttttgttgcacacaataaactaacatgaaatacagccacagagaccggtgtcctccttgctgtctcatttcgagaatctttctcaccgcagagctccgtctgctgtagctgccagcccgcgcacctccacaaaccttttactggcaactccggagtctggcgatgacccccgatcctccacccgtgcttcgctcgatttgccccgagaccattccccatggacccctgctgaagataaacccaccccgcttcagcagtcgaatggcgagagactccgggatcgtgggttctccggcagacgatatggccggcccatgtctatgaacttccaccgttcatcgccacagctaccgccgaccttgacagtacattcgcctaaatcgccgccacgcgtacaagatcgcgatgaagtctggacaccgcatggtgacagccgaaagactcggagtccaggccatcgcccgcgagaatcgatgtccgtctcgccggcaccacctcgcccgatctccccgataccgaagttcggtccgtccgttaatgcaggggatacaatgcctagggtgtcgcctgggtctctccgcgccaacctcactgggagcccggcagaccggaaattaaaaagtgcctcgttaccgcccccagccaaccgcgcatcaaagcccaaaatcccggcgaaaccagccatgctttcttacccagagaccagctcgttggctcctcgaccaggacgagcatcacccgatcgaagtgtttcaccttttagcacccctcctggtagcccagagaagcatgtggctgagccgaaatcgtctgggaagagcagtgctaggccagcaccaacattagctcgaccaaggacggagccaccaattcgacgctctttcgatgagcgattacctgctgcgtctccgagcgccagacatgacgctagagagttgggattctcaaggattcctcctggtccagagccctcacgtaactccaagcccttgatggtgcaagttccatctgccccagtagacgctccaactgccactgctacccctctttccgcgcaaagagcccgagccagtgatattccctccgatcgcccagggcttcctcctcgaccttctggggctccccgccgaagtggagtctctcccgtgcgagagtcttctagacatcaaagcactcattcgcagctggcaccggctgttggttctgtgccttctttcccacgtgctagccaatcctccgagccaaaaccaatccagcggcaaccatctataccccgtgagactaaactgtcctcttctcttcccgagcggcgcgtggtgcgtacagacacagaggaagaagagcaaatcgaagagccagctatcttacggaccgactaccccgatgcctcaaaagctaatcgtcgacctccccgctttaaatctggaccgagagatatcctgacaaagtatgatacccgtttgctggctgtgtgcggcaagtacgtgtgcacgactgggtatctgactagggtgtgggatcttacaactggtgatctagtgatgagtctcagccatggcgagactgtgaaaagtttatctcttgcttttaagccaggaaaagatcttgaaagcgagggtgagcgtatctggctcggtaccagtgctggagatattcacgaagtcgatatcccgagccaatccatcgtggccacccgcgcatacccctcccgccgagaagtcatccaaatcttgcgacacaagaaagaaatgtggacgcttgatgacgaaggccgactgcttgtttgggcaccagacgagaccggcacgcctaacttgcaatacagctaccacaccccttccgagcgtgtagcccgaggtcacacgttctccatggtagttgatgacaagctgtggttggcagcagggaaagacgtccatatataccgccctaatgcacgggatgatgtcccattcaaggtcttcaaacgacctctcggtcttcaacactcgggcgatgtgacttccggttcctataccacgcgagatggaggtcgggtatatctgggacacgcagacggcaaggttactgtgtattcctcaaccgattttgtttgtttggcagtggccaacgtcagtgtgtataaaatcaactgccttggatttgtcggagactatctttgggctgcgtataaaactggcatgatttacgtttatgatgtgtccaccaacccttggaccgtgaagaaagactggcgtgcccacgaaagtcccgtatccagcttcgtgttagacatgagcagcgtatggaccatgaaccgcctgcaggtgacctctctcggcactgataattgcattcgcatctgggacggaatgcttgaggacgattggttgggtaagtaaaatattgctctcatccgttgatggcttccactaacacatagtagatgcgcggatggatgccagagacgtggaatactgcaacttccgagaaatcaaggctgttgtcttaacttggaatgcgggagcttctacccctggcagtgtgcgaacgtcggatttcattcgagatgttgttacccccgaagacccgcctgatatcgtggtatttggattccaggagttggttgatcttgaaaataagaagatcacagctagtaagtgtaacaatgtttgtttgacaggaaggcccgctgacaccgcctcagagagcttgctgcttggtagtaaaaagaaagagaacggcgagaaggagcatatgagtcgtcagtatcgagtatggatcgatcatcttactcgtacccttcacgaatgcatgcctctcgaggaatcctacgttctcttgcatactgcaaacatggtgggactgtttacttgcattttcattaaacacaaggaacgccataacatcagaaacatccatgcctccgagattaagcgcggaatgggcggtttacatggaaacaaggtttgtgatattccggtctttgctatggcctttatctaattgcattagggtgcccttgtctttcgcttcatcctggatgacacctcgatgtgctttgtgaactgccatttggcggccggtcaaacccagaccgctaaccgaaacaacgatattgctgcgatcctagaagccgagtctttgcctgcggaaaatagcatgaccctgcgggcagaccagttcgctagcggtggtgatggcaccatgatcatggatcatgaagtgtgtatcctgaacggagatctgaactaccgaatcgactcaattcctcgaaatgtgatcattgacgcagttcgccagaacaacttaccaaaacttctggatcgagatcagctacttgcttctcggcggaagaaccccggtttccgcctgcgcgccttcaccgagtcacgtattaccttcgccccgacctacaagtacgacgtgggtacagacgagtatgactctagtgacaaaaaacgctctcctgcctggtgcgaccgcatcctttaccgtggcctgggccacgtcaagcagcttgattatcggcgccacgaggtccgcgcctccgaccaccggccggtcagtgcaacgtttaaaatccgcgccaagaccgttctaagtaaagaacggaacgcgtcgtgggaaatctgcattgatgaattccaagatgagaaacgccgcttggcttctgaagttagcatcgagtatctcatcactgtccttggcaccgatccccgccaggcccgtgaattgatcctgggaaagcattagccgctcgcatgattgtctctccttatctttctttttcgaagtgaagagcacttctttttaataagcatttgggtggaagcatggtgtatattgtacgactaatgattttacgatagatatgtatcatgacggttgttagagctaaaaaggtttctttatatgagtgtagtattgtaccaggacatactccgtactctttctagcattgatctgcattcaagaagccactctagagacctgatgtgacatacaataatcggagtattttccgaatgcgcatttcctgttattttgattcttttcctgtcgatctttctgcctttccccgtcccctgtcctccgccccctgtactcttcccagttaggaacattgcaagatactaaatgaaatctcaggagaatgtctcaagatgcgttttaccacaggactactccgtatgcagctcgtataacaatgccctttgcaaatcttatagtttagggcttagctatctgaactcttcaatctcatcttgacgtcttcgtagtcctctctccatacccctctatttaccaattgatgcgtgtaagcgatactactgtgatgatcgacactgttatccccggcgaaattaattaaagtgacatgactttgacccttccccgcacaagaccgggttctataaagatccccggatttacaagatctagttaattagcacagcggaacgaaatacaatatacagtcatgctagcgccattcactctcgctgttgcattgcatttgctaccagtagcaaatgccctggttagggaaagtggtgttgtatgttttcttctgtcatgaactaatcacagagatactgactcaaataagggtagattgcctgctctaggatggaattcctggaatgcattcggatgtgatatcaattccaccaaggttctaaccgctgccaatgaggttgttaatcttggactgaaggatctgggttatgagtatatcaacagtatgaaccgagctttgcataaaatgggttgaatcactgaccctttctagtcgatgactgctggagtattcagaacacccgcgataatagcacaaatcgcatcattccagatccatccaagttccccgatggtatctccggtgttgcagagcaagtccatgatttgggactgaaaatcgggatttacagcagttagtatcccctccgtctgtatactgatcagaaatcaagactgatatacgccaggtgctggtgatgagacttgtgctcattatcccgctagtctgggatacgagacagtcgatgcgcagtcttttgctgactggggtattgattgtaagtttttttgtattcccgtgaatctgctttcacctaaatgctaaaactcgtagacctcaaatatgacaactgcggtgtccccagtaattggacggattcataccattactgtgttcctgagggctctggtagccaccctaatggcacctgtcctgatcttagcgatcccgccccagaaggatatgactggaaatcatcgaacacatatgcccggtatactgcaatgcgtaatgctttactcagccttgaccgaacaatcttatattctctttgtgactggggccaggctgacgtcaatacctggggtaatgaaaccggaaattcatggcgcatgtctgacgatatcaacggtaagttgtttgactgatacgcagtggtagatttagaagctgactctgtgttcagcaaattgggcccgtattgcagaaattgccaatgagaatagcttcctgatgaaatatgtcgatttctggggtcatcctgacccggacatgttggaggttggtaatggagctcttactctcgaggaaaatagggcacactttgccctttgggccatcatgaagtcccctttaatcattggcacggcggtatgtggtatctttggatgtcttatgcttatggcaagatatactgacaaccccaaagcttgattctatcagcgatgaccacgtggccattctgaagaacaagtatcttattgacttcaaccaagaccctgttattggcagtcctgcccatccttataagtggggttacaatcccgactggactttcgacgccgtccatccagcagagtattggtctggtacatcctccactttacagggcactttggtgctaatgctgaattccgagaatgtgacttctactcgcactgcgacatggagcgaggttccccagctcaagagccatgatgcatatcatgtcattgatgcttggactagcaaggatctgggctgcgtgaagactgagtatagcacctccttggagagtcatgatgtggctgtgctggtggtcaagagacgatgctagacagagatcatcaaagaacaatggctttgttctgagtggtcagtatttagtatcgcagttattgcggtagacaagcacgaattttgagactcattacccgtgacatatctccaagcatgtaatgcttaggttagagagcataaagagcataaagagcatttttcatggttgttcaggtgaggctcaaagagcttaaggggatattggccacagtgaacatagaaacacaatggccatatttaggaaatctataacaaggatatgaatattatccagtcaatcagaactcattacaggatccgaggctggtcgaagaacaaagaatattggcgtttgatattccgccgagtatttatagtctctttatcggctttcatgattatattggcattgttcaaatagaatcaatatattgtgaaaaagaaaagcccccttgagtatttaagtgcttcgatgtcccggcacaatcctcatttctcatcacacttcacatctacaatcacattctcagtatttactaccaaactcattagactaactaacacattgtattcaggactatcttgcagcaaccatgcctgcccactaccactgcaactctcataccggcctgccccgggtttggctaggttggggtgagctgggtaaccgcaaggctcaactccaagctgaacagaacgagtaagtgacaaaagacacacataaaaaggatatatactaacattttattagatatttcgaagcctatgcccctgacttcaagctgctacacccagaccacccccgactcggctggaatgtgcacttgaatatcattcgcaagtcgacccgttggattgactggcgaatccacaagactggagataagcagaagcttgttcttcctgatttggtacgtcctgagcaggtcgacagccttcttaatttcttttatactggtgactattcggttgacgaagccgacttgaaatattattcagttaggccctgccctggtggctgcgtgacttgccctcagatctgtcagcttttgcgcattcatttgtcaatgtttcagactgctcttcttcttagaattactgacctccaggctattgcctttcgcagattccgtgatcttatggatactgctcctgctttcgttttgcagtatgctgttcactcagtgtatagtagggagcctatccctgacgggagtaataactttcagattactggcttaaagtctgtcaaagactatcgccctgagttggtacttcctgcagtccttaggtactgcgggtattatcgactgaatccccagcagcttacaagacacgggaagagagtgagagtttttggtgagtcggagttcgctgagctccgccgaaaaagccctaagtttgatggagacctggctcggggcttatggctcgacactattgatatcacagtcccgaagattcagttcccgggtaactcagagcccatcaggtctctgcatccctatatgcacactctgctcccgccacaggcggtagaccccaaacggtcaaactatcagtatgttacttacttgcagccattgcccttcaaggattttaatgaccagcgaccttctaacacacctacatggaccccgtcacccgaaaatagttccacttggtcttttgctaccgcaagcacctcctttcaaagcacgcagacacgtccttcgttcaatcagagcattcaggcttcagtacaacagacccctgatcctcaattgactctagagcagacagaggacctgagtttcattgacgaagctctaatcgatactactatggaacaactcaccgcgcaactaccacaggaatatgccacgagtccagccgatttgaataatattgactggacacacacgatggactggagtgcagcggatgtatcagatattgatttcagcacgcttttggatgatgatgctgtggatgagccggatgtgaatgcattggacttgacacaggtaatggactggaccgaagaggacctggctaatgtggacttcacacattttttgaatgatgacactttggatctacagtctttcgacccatcctgcctggaccagcctatggatatggatttagacctatcagacccgagtttctttgatctcccaaacccgaaatccttcgatatgacagcactacctgatatcgacttttccgggctgactccacatgattccatcgacactactttctggactcaatcccagtatatggactcaatcttccctgtgggaatggataagtatgtcactttgcctcaacagattactttgctgccagatccattgaactcagggataaacccggacttgaccgcttcgaacctgaaggccggacagtcgatccagtccgcgttcttttctgtgagagccaacccgcgtacatcggtctcacatcagagtcaagactctactcaatctcggtacaatttgaggaaccgcccgagcatggttgatttagctgaggagctatagatttaaatgatgaactaaggtgagtcattcccaactttgctattgagcagtattaattcttcttcttttgtctgtacttctacgcatatagacctgtcttttcacgtgttctttgaagattgagattatctataagaatcaataagatatataaatcagcatcatcatctagtatatccatagtaataataatatagaaaagaaagagtatcagccggataataagcgacgaagtatgtgacttgattctcattgggcacctcacttttgaagcatatactccgtagataggcataggaatagtcgactgcttattcatctcttttggtctgtctttttggttttcaaacctattcagaccttgctctccagataattgcatcttgctcacttcgaaatgtcaatgagccatcatatgcaagcatgcacgtgctacggcacgctaatacagactaggctaggctgccttacttaatcgacactcccacccgtggatccactttcacgtgccccttgatcaaaaagcggcacgaggtgagcactaaaatggatggaagtgccaggcactaagcgatcataatacatgcaactgcatatttaccatgtgtcactgctgtgttgccattagttacaccaaccatgctaattgtatatctaattaagctgaatgtacggatcttgattatgttgatgccaaggggaacccctggagccctggagtatacttgggatgactaatatcggtacctggggtacctgaagggcttaaaccggaaggtgccattttcggcgatttaccatcaaccttggaattagccctagaggtcatctaggaggtagtagtttatccaatcgagctggcattgcttgcgcagaggaaaatcaattagcatggtgtagtatagtgtcgtactcattgtactcatatacatggacttggtggtatgtatacatcgagtcctgaaaccaggatgtccgcttgcagcctgagtctccccagccctaggttgcagatcttttaataactgtggatacagaaaagaaccaactttgaaccattgctgttctatagatcgtgcacttttgtatgtagtaactgttgtatgttgatatctcatgtaaccatggaaatccacccagtccactacgtcagagcgtctgccctgttatctttctttttccatttgacctgaacattgcctacttcctatcgtctcctgtcttttgtccattcccttctgtatttccttgcccctctatataaatacaatgcaatgaggcggctctattccccgcttcgggattgcgtttccccccgcgatgccagtgtctcaccacggtcgcgggtcttcatctacctcggtatagcagtgacattactgcttctatcatatcagctgattctcgaccgatcaccgaatagaggcataagctggacagccattcaggatatcgtggctggcgatgacgaacgcttcgttctggatgatatacccgctgataaagagttggttctcgccgctatgcaggctagcaatatgtcctgggttgaggagcatctgtcacactggaaggtgaatatctatcgtgcagatgcgaaacacgaagacggtggcttgaccgtcccggtaaataagggcaatgaagctatggtatatctgacgtacgtttttcatacttcgagtcttgttgtcatactaattgccctcggaatcagctatattatcgatcgttactggtcccttcctgaagtatcagtcttcctccacggcggccgctaccaatggcatgtcgataacccgctctacgactccgtcatctccatctcccacctcaacctcgccttcgtccaagaggctggctatgtgaatttgcgctgcgcctggaccgtcggctgtcccaccgaactagagcccgctcgctatctccgagagagaccagaagaccacggacatcccaccgcggtcgagtatcccgatcggtttatggagttgtttccgcgcgcagaagtcccagagattgttgggacaccgtgttgtagtcagtttgctttgtccaagaagaagattcacgagcagagtctggagcactatgttcgtttgcagcggtggttgatggagacgaatttggacgccggcatcagtgggcgtattctggagtattcatggcatagtgggttctccattcgctgatctcttgatctcttgctaatattgactgtttacagtgatctttggaaaaccggctcagtattgtctcgaccaacgcaaatgttattgccagacatacggttattgtaatatgaccgacagcgaaatccagaagcagtgggtatggcgcggtttacagctgccaaaaggatggccaggacagaaccaaaccgcggaatagccacgcatgtatatcgcccgattatgcttgaatgaactgaacatttccattagagacctgacctatgtacccaatcatcatttcatgaagcgcgttcctcgtccgctagacgacctcggaccaaatgtctcaagatactgaccctcctattcagtggaatccatatataataatctcaccgccatatatcctgcttactcgaccgcttgtggtatccctgactactcatgggtcgttcttcctcagccggaacagccaggaacccaccgaacccgttcccgacgagcacgctcttgcgagcatcgccgccccaagaccggtttagctgggcctcgtggaaacttacggggcgcgtccttgagtcgcgacgcccgaacgccgggctagggtcgtaaggtgtgaaattccactcaaactcatccaggcccttgctgtacacattcaggggctgcgaaagaccgccccgcatctgcggcccgccttcacccccgccgaagagtcgtggtggcggcatgagcaacagagtatcggggaaggaggaatcacggacatataaatctcgaagagctggtaaggttcgcgacaccaacgacgaaataagataggtatagtatgaggataccactggtggcattccgtgattatccgtttcggatgtgagttcatagtgcaggagatgcagtgacttcgatgccatgggaggaatctgctccattgggaatgagcgagagacctcctggatgatagaaaggctgtggagtcgcggagcggcagaaagaatgtaatgtagtcgggacggagcaacgccagtagaagataatatcaaagaccccaaattcgcacagttcgctggcatggaaagaaatgcgacaagcccgcttgccgtgacattgggggtatcgcgaagtgtaagagactgaactgccgggaatggtggaaggggtacgttcactgcaaatgcagaatcgtcaagccaaccaagatcttcgagcgtgagatcacgaagatgggggaatgaagcgattccgccgcgcagggtactagcctccatttgaactccagacagctcgagcacctccaaattcatccatagttgagagcccgggagacgtgagaaactgccctccgcaccttggcgataggccatgcggcgcagctcagggcatcgagccatcaactcctgtttcaaaggtagacacgatggctcgtcgctatacaaacccaccggcagatcaacaaagcggagattaggaaggacggagatagtgcgggccacgctggctttgttggcctcgcgggtcatgtatggcattcggagtgacaacaccatatttcccagcccctgtgactctcgcactgttcgcataaacaattccagacggacttgcggggcatcgatgggatcgccattgcggtcaaagaaagagcggcgttttcgcttagcggctaattcgatttcgagttcgcagtaatggacggggtcgattcggacgttggtgtaactggcagcagactggtgttagtctctcgcttgacaaaaggcccggggatctcctacagaagcgcccgcgcattcataaaccactgcttgttgacgagggtgcagtgtgccaggtcgcgcatgtcgcatagcatacagccatcgctggcagattcctcggatgtgccatatgtgttatcgacggcgtgcggacaaacaaaggagaaaataagtgccaatactggtcgaggtagctgtttggtgtaatctcgaccaggcacattaacgcggggcgatggtgggtcgggtgtttctcggtcacttcgccgtgagctccgtcgcgagcttcgtcgcagcttatcaaaaaggcccattctggctgggagggtgtgggaggatgtgaaaggtaaagaggggagatgattgggacaaagcgcgttaatgcagggtccgtcaaccatcaaccccccttcagcccccagcccctaacatgaaacacgggtttcatcacgtctaatatagctcgaggatctttgaagatctttcggatgagttgacacgcggcaaaaattatttctcataggtcgaatattatggagacgatttgaggccgcgaatttcatgacatcacggagtcaacagcgtcatttctaggaaatgcctacacaatccatccgatatctatacatggttggccattgactgacatcgatctggacagagactaggagaatatacatttcccttcacactcctcacacccctcaaatcaccatgcctgaaataagtcgcaacttcgtcgatcctcttccctgcccagcacgtaccaacgcaatcccagaatccacccctgtagaacactggaaactcctgccaccatacaaggtgcaatccgaggagcaattcggtcccatcaagtggcgtggaaggtgtttctgtggaaatatcacctatctcttgaagcgagagaaaccactcaatgccaaatactgtcactgccctgtgtgccgagttacccacggagctcctcttcagtgggcggcgatcttccacaagcatgatatgtcattcaccaatggtgcaagcggtttggcgttttattcttctacacatcgaagtcagaaacatatcttgcctaccaaggtgtcttgtgccaattgccggacacctatcatggatgaaggtcggaatatgtgtttgatttttcctcaattgattcagctcgagggatctagccaggagcaaagaaagaagagggaggttttcaagccgacgtatgtgcatttgctactactccaggagtgcatactaatgtcctgctagatgtcatatcttttatgagtcacgcatgctagatcttccggatggtcttcccaaatggagtggaatggcgaatgtcagtgaccggatggacgaccacggtaaccggatcgaagtcggaaagatgattgtataaacaggcgacaaccggatatggacatagaagttgaatatatgtacgatgttcccaaccaagcttgcagtcaccactatgaagccgcgcatacaccatcctgcaccgacaccggatcactgcttgcgctaccccaatcagcagcgccgataaccttaccagcctccgtactatcatccgctcgaatctatcgaaacatcagcattggctccacattgcaaatcaagaaacttacatagtactgtggattgacagagtaccaccaatcatcactccggaatgcagtatccagtgattgactcgccggatcgttccagccggtattgcgagtatcgaagtgagcatgcttcgaccacgacacatacaccttggggtgatcattcccctttacaccgttcggggttttggcatctccggcattgatctcgtcggtcgtaagggtgttttggatatcgccccaggccaggttgtggtacccgctatgcgcagaaagcagggcgcgtgatggtgcccacatgttgtcgctatcccgagagtggatgatcaccactcgttcccagtcactggaacgatgttagagttgggctgaaccacaaggccagaaagggtcacctactagtcatgcccagtgttgatgccagcaaaatttgcgccgtctttctcgtaaaagagattatacacgacgcgaatctcggtctcgttgcattgtcggtatgtatagtaaacgggaaatgcaggtccctcatttcggataccaacgccagggttgcgacaattgcacccgacatctgggtaatcacactgtgccgcggccggtgtcttgtgggcagcatcgtagacatccgatgtatccggtgagccgctgtacgcccaggttggatagcagggtggctggttctgggcttgcccaaagaaccagatgggcgcgtagcggtctgctagatctaaaccaccggcatcgaggagggagctcatctcatcatttgttatctgtgtgagagctgccactgccacatggctgacggccaggactgccaagctagctcctagcttgaactgcatggttggacttgggggaatgttatgggatacaggggtcgcgatttgaattgtccagtatatctctctcttaaatacatactcttggagacagcatagccaggaatatccaagacaattccagagaccattttccaaatggggtgatgagttgctaagggttacatcgcgacatgcgggtctgcatttatattagccccggaggtaccccgagatatcccgcacgtgtgtgcagtagattatctcagtcgctaattattagttatctggcttggattacggagtatcactatagcaccttagaatatacacaacttaagcaacttagagaccgtcgatgtgtatggaattcctcaaacagcggtgaagatggccaggtagatttcaatgggggctacagacggattggggagaaagcagggtagaatatatatatcttagtcgctcagatgatgacttcgtattgcaggcttatgaccctcttcagaagatatcacttcaggacttctcgtttaccaagtacatgcagaagcaatcccccaaaaaacctacaatggtggttgcacgaaaggatgtattgatgatctcctttcctctggccaacagatcattatctcaaacgatgtccgaaataaccagctagcatcatatttattcgttcctagctagtgttattattcatacatctcttcggtagctttaatgcaacaaaaacatcaatagcttatatcaggtgacttctattttgacagatcatgtgatcgatctctggtagatcaataagcttccctagggcgccgtcatttgtcggagaatacacccaaggagtcggacagcatccctgccactagaccttacaccaaatcaggctatatccacactatgtggaggtaaccagcgtctcgaggtctgtttcgactgatatctagaccctcgcccgtcaaatttccatcttgcactgatctagctaccatttgttatggcccttcgaacgcagcttttctggacacagttacgttaccgtggagaatcctaatagaggtctactggatggatgatctcgttgggagaaaagacaagagtagattctgttgtgctgatgatggacagagaggagaggaagagagacaaaggacggaactagctggtctatctaatagtgggtgaccgccttgccggccacccaaaacatccacatctaggtgccggaatgttaactggcttccctttcggcaaatgacgcacgagggcgcctttaaaacggaaattccctatgccttaggctcgactaacacatgtccaactgctgttcacatggaacctttccccacttcagtcatcaaagttctcatttgagtatttgctactaccaccaagatctgcactaggggccgttcgacccgggatcactcccaaggcttcgtcacggatccccacgcctgcctactcgtcagggcatcgtttctaccctgacggcgaggtatgggtctagaattttgacaaagttcggcgacaaagtcatcgttgacccgaagcaattggcaaggcttttcaaaaaagtaacaccaggggccgacttctgcccacgcgaacacacatgatgaagaatatcaatgtcggattgacgtgggcgaagatgtcaaggacaagcccgatcactataacgtctaccttcaagtcaatacccaggcagaaagcgttactagtgagccatttttggtaagtagaactggcgatacggaatgacccgaacacgaggttaaggtgccggaatacacacaagaggtgttagttcatttagacagcccgacggtgcggaatccgctaaggagtgtgtaacaactcacgggccgaatgaactagccctgaaaatggatggcgcttaagcgtgttaaccgaacgcgaggttaaggtgccggaatacacgctcatcagacaccacaaaaggtgttagttcatctagacagcccgacggtggccatggaagtcggaatccgctaaggagtgtgtaacaactcacgggccgaatgaactagccctgaaaatggatggcgcttaagcgcgttacatgctttcgaattctgagcggatattagcaggaatcttttgtcaaccggtatgagcacagatttactcacttccgttcggatggcggaatttaaaaggaaggagctagacatccctgagcactcttgcttatttaatgagtctaggcgactgcctatttggcccgtatctcggttcttcagacctccaaagccatttcaaggcgcttgtgagctgaaaggtgattggccttgaggtaatttcctcttcgcgcattcgtaagaaatctgccagtctattctcacgccagtcgacattctctggcgccgaattagcgccgaattattcgtcacgcgctctgggaatcggtcaagaacacaagcaatcaagcaatatctgcattcgcaaataccccttcgtcctcgaggactagcgagtcaggttcgatagcttcagaaatatctacgtattcgttccagagcatttggtggacttgttcattttctgtgtcgtgtttcgtacatatctacatgccctcagaactgttcatgctttgtagccggcagcatagcggcggagagagcccgggcgtaatggagaataggattaatatgtatctgtgtaggccgggcgcgtactgccagtcccgtctggttcgagtatagtagggggttttgactatgtaaaagtagaattcaaaagtggagaattaagtctagcaaaattgaattgatgccttctaccgcgtttccggtttcttggtcttcccttgctattctagtgccacgctgaattaatcccggtgatctgaagcttgacgttctgggtcactccatccgtcgagacaagtcgcgcttcagttgcatcttccttagggaatatctgagccgtcaaagagacctctccttgacccccaaatacctcaacactagaccaatccacgaagatctgcaggttgatacgtttatccgcgcctgctgacagtgatgtgtgatacaaggttgcaaaagtgtcgtcaaaagatgcatctcctgaatttcgccgatccacgaagacctccttgctggtaaagttgtagccgatcagtgtttcttgcttaaagtcagagctagcacggacagcgatcgcaaacgtagatgcaagagattttttggagtcatgatcggaaaagctcaagtcgatcttgaatgccttgccgggggagttcagtttggttgatcctttcgatacggatttccaggaatgttgcaaggtctggtggttggcaacactctgccagttttgttgcggttgttgaacgagggtcaccttcccattgatcgtctgcaatgacaactgacggggaacagacatggcgcttcgccaagggcttgtcgggatctccgtgccatactgccaattattcatccacgcaatctggaccacatctccattaggaagtccgttataactggcagcagcataaaagtccggaccccaatccatccagttggcagaactgtttcctggatagatgctagcaggatcagcctggaaagttgttccgtcgaagtcgccgatgaagtattgtgttcctgatccgaccgtgccaggtggtccaccaggattgagcccaagaacaattacccatttcttgattgatttctttcctttgacgggcagttgaatcaaactgggacattcccatacgccgccgacagagttgtagggtccgaactcgctggccaaggaccactctttgaggttgtcagaactccatatcagcagcttgtggagtgatgccagagttgtgacggctatccatttctgtgtatcgccatgccagaatacgaaggggtcccggaagttttcgaattctgcttcatatggagagggtgggttatgaatcacaggattctcggcatcgtatgttgtccacgtctctccctcgtcgagactataggcgattgactgggattgctgccctgcggtaatagattttccgcttggtaggtcttgagacacgggatactttatgaatcttgtcagtctccatcagtgatcaagtaaaatagccacgcgtaccgaagaagtatacatggcgaccaaaggaatctttccatccactccgaagccactcgtattgttcacatctgctaccgcgcttcctgagaagaacatctcggtgacctcgttgggatatccgcgagcaagtagagcaatcgggtgctcttcccagtgggtcaaatcgctactcgttgcatgaccccacgacatattcccccattcaacaccagccgggttatattgaaagaaaagatggtaagtgccatcgtgatatagcagtccgttaggatcgttcatccaattttcggcaggggagaaatggtattgaggacggtatggttcggtatagtccaggccggacgctgtcccgagcagacccagggccaatgcgagtaatatgcccattttggaattggaggaaagccgctatgcaaaataaacctattctgttctatcaggaggaaattcctacaaaatttatacatctgcgaaaatcgaaaatccctcatcccccacattccatacttcttggcataccccgtggggattccactgccctgcagatctcggggaaatacaaactctcaccccacattcttggaagagaacacttaaacaattggcacgcccggagttaactcgctgaaactcggaagtaatttcggagctgagacatctgctgtcttaatcgggtagtgttttcgcccgcatatacatatcgtggaggtatgtgcgggtgaattatgatgtgatcgaagttgctttacaaatgaagtatgagcaaatgagcgatttatatcattagggtttgccaagtcggctaaatccttgatgttaacttgacgatggttacttggcgtgatgcgattccaaggcacaccggaaataacttgcgccacaatattcttagtctaataaactcggtgagagaaagcgagaagagagatcaagaactgtctattggtatattggactaattgtctcgggagaaaaaagaggaaaggaaacatcttcatctaattgaattgctgagcaagtttgaagtgtagtccctcactcatagtacggcttcgcatttatgagcttgtaggcaacctccttgtcgtgaccgaaaatcaacgtcgcgttgtacagtctttgcagtctgcggatcatgttgagactgcggaaccacgcattgtgatctctagctaatccgccatggggatgacccagcgtatagttctctgcaacgtggaactggtccgaggtccaaataaatggtccatcattgaccaggttgacttgcataatgcagagcccaggtgtatggccaggtgaatggtggagggttatgccctggaaaaggtcaagttgcgactcggtgaaggtgttccactttagctcttctagtagcatatagtatgaaagatagacgcccaagtccgctccggttgctatcgcccagcaagcgtgcttgaactcttcttcgtggacatagattgggacatctgtgttcacgaaatgctcaagtccgccggcatgatcaaggtgcagatggccaatgatgaccgctttcacatccttgatgtcatttccagtggctttgatagcattcgggagtttattgttctccgagtattcaactcgcggaaagacatccgtgacgggcgctggccatttctgtattttgtttagttatacataatgacgattgcgatacgatccgacaaaccacttctagatcctcagcacagccggtctcatagagaatgaggccaacgcccgggtactcaataagagccgaaataagcactaaatctcggcgtttattcaccggattaaggttgctcagggtgcttgaattgccacctcggaaaatcctgtgcaagttagtaagaaaatcatgactttagcttccattggcaaacacaaaccatgattcatctgcttgaagggcgcccaagttcagaatgtgcatttttgtcccagcaggacacttgaatgctgggactgctgcagataccagctgagaggcagggtcaacggaggaattcatatttcaatttgaatagttgaacaatttgaaatgaaaaaagaaatatggaggaaattaaaaagtcatgcccaatatgccggcagatctgatgaagtcataaccgtagtcttcccccgcatagaccttggtatagcggccgaggagcagacccaccagatgcccagaagggaattgacaaatggaattgacgaataagaaggcaggatgggtcaagaatattgacttggcatttctgatttagttacctcggcaatggtaaaagccctttcaataggaaggtatcttagttccctgttgtatatggcttcttaaaggcagtctgccaactctgccacgttttcgacatatacaatctttagctatgaaagtcaaccctaactagataacatgtaacggatctacgatcttcatctatctttaacatcggtatcccagctgaccgaggtacggagtataagagctctaataccgctgccttccgctatcctggcactgtttctgtgtgcatatagaagaaattagccgtagaatctcatcgttttaaattataccactcatggctgcgcgtctatcgcttaaaaattcaccgttcctggactgaccgatctcgtgacatctcacgagctgtacgcctgcaatatttgccacccttcgatgcagatgcttagtatttagatagccaggctgccaatgaaaaccgtactataataggaaatgtccgctgttctgaaaacaaagatcagacaatcagggccctacttacatatctgccggactgccacgtcttgacgtacaccatttgcagcaggaagaacaaccaccgagcacaatcttaatgtctttctcgtgataatagtacttcatgatacatgcaacgaagataaataagctccgaattttcgtagcatatggagtctatttgctctccgttggtcacgtgtcgtggggtagagggcgaagttgggcagctagcatcaacctctaaccttcgggtggttgcgtctcttcttgttcactacaatttggtacagccaccaaaggcataaataacactattgctctgttggaaacgcgctcgtcccctgatcaagtcctcaagtactagatatctcccgaaagaagtttatcctggaagattttgaaccccaaatggtcgttttcaaatcctgcagtccagacatcttcaggaattcgacctcgcttgtgcttggctgggagctgatgtcccttgataacacacgagtcaaaatcgatgatcacgaatgtgtcggcttcttggcttgcaatcatgatgtttctcgtgtggatgtcattatggattagattgagagcatggagctgatcgagtcccaccttgatctgctggagacagcttttgttctcgactgagcgcccagcctcaaggcagccggcaagcgtctccacatatctctggaaacaaagcccggtaatccgcccccctttcaccacacatccaagatagcgagcaatatttcggtgttcattttgcatcaggacctggcagatacgagcttcctgaagcaggagcacactcaaaaattccgaaccatcatagtcaaggagctggggctgtttgatgtaaacaactgggttatcggcatcgtgacatatcgaaagaccatcttctagcagaggccaaatgtgttcggcaggaatctccttgagacagctttcggcctcaggcagaatctcatctgggtgagcgaactttccaggcagctgagctgcaaagtacttgtcgccatcctggaagatgacattagtgtaccgaagctttgggctgccgccgagctcccagatctctgccatatcacgataatgcattgcggaaagggggaattctggcaaatttgaatcgaaatagatgtgcgaataatagaataggagattgcgagcccgccctatataagagacctaagtcgggcaaccgcatacgcacgaacctcctgtcataccgtaaagtgtagcggtgagatgactgcatcgaacatacaggaggatttgctttttagatgcagagaccataatgaatagcactcatatttggaatatatcccagcatggtggccccttttgggtgtggtctgagcgtccacggatccacggtagagtaaatgctgactaatattaatcggagaggactgatatatcacgtgactggatctgagcactctcattaaagcggcagctgcaataggaaagccctttgtatagtaacctagatacgtcttaatgaggttccaataataaagtatggagtataaagtgtgggaaattccctaatactattaaaagacaaatctcgatacatgttgcccaagatgttgctacactgtatagctctaggtgggacggacacaagactgagaacaagggcttgcacctgttcgaagatgagcagtagtggaatatatattgccaaattgcaggagaagtgaagttatccccaacctttaaaatgtatgttcatagatgtacggagtaccgagttagatccaatgacatcagagaacccacccaatcgcactcttattttcttcccctctatatcctccctcttagcaacatcacatctccatttcagctcatataacatgtcttggtcacagaagacttttactctccctactcgcagccgcggctcctacctgatcaccgaccatgtcctccaggaggtccccgagatccgcgactacaaagtcggcatgctgaatctgttcgtacagcacaccagctgtgcgctttcgctgaacgagaactgggatgacgatgttcgcgccgatatgagcgatgccttggatcgcattgcgcctatggataagaagggggatttgtatcgccattctgccgagggcgccgatgatatgccggtatgtgtttggagatagcaggggattgggcattgattagatcgctatgctcgcttcaggagtctagagtcctctgattatcctccgctgttattttcactctcttcgaatccagcactaattcaacacaggctcacatcaaatctgcgctcattggcgcttcggtcaatattcctatcacaaacggtcgcttggcaacaggaacatggcaaggcatttggtacctagagttccggacgagtcgacacagtcgcaaggttgtcgcgacgatccagggacagaaggcttgactggatggggctgagcgagggcaattgtgatttatctggtttatctgatgccccagctacgagtgatgcaagacgagttgcaagaaaaaaaaataaaggtttgggttggcgagatagtcgacatatgacccggattatacgagatcatcatatggtagtcgatgtaatacacacatttttggggacaataccatcatcacacacgatcgaagagcagcagatccattcatggatattctgtacacggcctcaggcccaaaaccaattgaaaaacgcaaattgtgcaacgccgataaagaaatctcatgctagccgtctatcgctgctccaagccaccctctgtcacacgctgagactcgttcacctcggcagcgtcaccggtaggttcgaggggatagctggtggcaggcagggacttcaggtaagcgcggtgctgttcatgagcctagagaggtgttagcaaagatccaatcgtagccggaaagaccgcggatatcagtggacatacgaaggggacaccgcagtatgtgcaggtagcgatctcgggcttgtcggtgttgatgaaaatcttagggtgaccgagagggccaccgccaccgtcacagctgacaaccctggactttgtccagcggacgggctgtctgtgaatgagctcgatagcagcatatggtcgcggctaaagagtagcatgttagtatcagtccttgaggcattgccaacagcaattgcatgagcactgctgttttcaacgaattcgcacctgggactccatgattgtctgctcaaagcgaggtccaaccatggctttctcgcgcggctgctggctggaggcccaggtggtagcgcggttcggagcctgcatgctccggatgcgctcgccaacctcgggggcctcctggagagtaccatcgttagtgggctcggcattggtcgcggagacattcggcgtgggcttccgcggggtcgggtcgttgacttggatagggttctcgctcagacggggcacggtcgaggagtatgcgcggacaacgaagcgtgggcgggccgacgcaaaggtcgcaattctgcggccacaggacatcattatgggcaagtttccccgggatggttggttatgacggaggataagaagagggttggcaagggaccaggtgcaagtcggcactgaataatccgcgaggtgtggtttggtgggtggtcaccgcttgctggttcgagatagctccacccagaacttggattttctgccgcgtcattttattttgcgtttcgcaagtgaagtggctcgacatctttctttctcctgatttttaaattggggtttgtatccattaagatcatcctttcaacccatcatggctggctcttcctccccggctggaaagcctgagaagaccatgtcgtcaactctattgaccatgaaggtatgaatgacagtttcttggttaacagccatacaactaacactatatcccagttcatgcgacgcgctgcagctgccaaagaaactcaaagcccatcttcggatgctagcccgcacaactccaagcgcccccgtctctccaccgaggctgagagcccttccacctcagatatggatgcgatcgcggctgcacttgctgccgaagaagaaaagcggcaaaaggccgtcgcacgagcagccgcagaggccggcgagacacactgggttttggactttcctgctacaccccagtccactcagcagcctatggtattggcggcagattcgctggatgcagatgatgatacccattccggtggtcggcgtgcatatggcaatttcaagcgcaaagagcgcaaagagcgcaaggtcagtattctatatcttgcacttgatattttgtactcattttttcttagcccgaggacgatgaagatgaagacaccatagtcaacccgtcgaatccagaagaggttaccaaaatgcaggaaaaatctagactcaaggcagaagccaaagcaggaaaaacacgacagacgaaactgtctgaactcactagtatatctggctctggccgagcgtctttgttgggagccccctcctctgacaagaaaaagaagaagcgcaagagctactaaacggatgattttcacgatcccacctcggatgttttgattggcgttttagcatagcatttatggcgttttggggttatatcaatcagttccttctcagtatcacctcctggtggtatatgcttagcaatcaccatgatcgttggcctactaggtatgtacttctttgtgtccaccatacgacaagtaaatcaatatctataagcgacgtagtcagaagttcttacttacaaccgtgtttactctcctatggaagatattgaatcatgtaccgggatattatcatcaagtattattcatcctcttcttataaaccaggtcaacatctatactctcggtcatcgagaatttcggactttgtacggcgatactgacgggagctcgaaggatatttggtgggacttgaaacacagcacaggatgaatgtgagcttacatggatatcgtaataagaaattagtagggccgtatgttcgagaggtgttccataagaacggaatctggaggcagcttgtttgggcggctcattgagacaataatcaatgtacattgtatatactaggccctaggctctgctaaggacctcactgagagcactacatagagttaagtagcgaccggctcttcccaaaaagaagcaagaagatcatctcaaagcttcgccttctcctcctgcttcttcttctcccaccccttctgcgtcgcgaaattcacaatcaaattccaagcagcaaccccaaccccaaccggcggcacagccaacaaggtccaagcccaccatttcggactggaagctgcaatactagccatagcccccctaacagcaacctccagctgtgctttatcagcatcattccaaaccactaccccgcgccccgtcgtcgtcccccggaactccgcctgcgtcgctttcgtccgcacatctccctgactctggacccggttcgctgcatcctcggctgtgagatgtgcatcgcgggcgcgcaaccgcgccgtttggatttcaggatcgtgaaccccgaccacgattacggttccgcagatgagatccatcccgctctcgaagaggagcggtacatccaggacaaccgcccattggccacgcaggtagtggtagattagggctttgtagacttcccaccgtacggcggggtggacgatgccgttgaggacttgtcgatcccgtttgcgttcttctgtgctgccgaaaatgcgccgccctaacgctggccgattcagtggcttcccgtttggatttgtaggcgcatcgtccaatagtagatctggtgtactagggccgaagtagttgacgatagctttgtagcctgcggtgccgggttcgactactttgcgggcgaggagatcggcgtcgattattgggagggagtagggtggtgtggagaggatggacgagacagtagacttgcccgttgctattgagccggtgagcccgatgatcagcattttagctttagaagaggagagtggcagaattgtaaagttgtaagaaaatgaaggtgctgaatgcggggagataaattagcctcggctccgcattaagcacgttttcatgtacgtcacgtcacctatgcagctatgcagtaggagattctggattctctaaattccaaacttcatccagtaactaatttgctatatatccgataacaaactttggaaaatctgtgtagtctcggttgcgaggggtatcctcggcgtgcacttgtagtcgcatgaagcactgcaacttgagagcgcatatacgcagagcaagacgcctaacccaaggcagtgaaaaagcgggcttatatggctgatatcttccatcatcaattcaagtttccggcaatccatgtgaagtgtcttgtacttggcccttccacccaatagccggccatcccttgggcagcgaggagaatggtggcagggaatagcggttgtcacagccaccttcccatggacaagtcagatcgcacagtccaaacactttgcagtagcattccttcgcatcggggcaatgtacagggtcctttccaaatatcactggagaaaatgtcagctttcgatcggaactgggtcattgcggggaaaacacatactatgccatgaatattccataattcgtccactcaaatcatcctctagcggcgtgtccgctagccatgtgcggaagcgctcgtagtcactgcgcggccgttccagcaccttggtgcgggacacaccaaattgcgcgcagcacgacacgcctacctcctctgggattggcatcccagggaatagctccatgaatccatacttgaagtattcgccagcgtgtacattgccgcgatgcgtatccgtgagaggacggatttccaccgggcatccaagggtccaaacacatcgtaggttgacatatccttgctcttgtaggtatggaatctggagattttgtagcggtggaattccgtcgtagtacgggtcgtcgttgtgccattgatagcgtcgcgagtggatgaagagcattgtctctggtagattatcgtaattgtcgatgatgtatctattcaacagctcgagtcagtatgcgagacgaaagataacatattgcatgtcgaactcacgtcaaatacaccatcgactcccggcctttgttgcgcgccaccgtcaatggtgcgtgcttgtcatccaccacgtagatacttttcgtccagtcggggaagtattctgacagccatgacgtgtcatcacttttcatgctggcgacgaccatatcctttcgtctcggtacagcagggcgagccagctcgcctgnnnnnnnnnnnnnnnnnnnnnnnnnnnnnnnnnnnnnnnnnnnnnnnnnnnnnnnnnnnnnnnnnnnnnnnnnnnnnnnnnnnnnnnnnnnnnnnnnnnnnnnnnnnnnnnnnnnnnnnnnnnnnnnnnnnnnnnnnnnnnnnnnnnnnnnnnnnnnnnnnnnnnnnnnnnnnnnnnnnnnnnnnnnnnnnnnnnnnnnnnnnnnnnnnnnnnnnnnnnnnnnngcgacctcgcctgattgttttgtcggtccatcctgtatctgcgcatagctgcctttttcggtcttgacgcgggactttgttgctgagaagaataaaaggtatagggcgatgacgatgaagatggtaaggaagatagccttcatgcgactgcgacgtcgagggccctgaggcccgctaggagcgaacaacatgttggatggagggcactctgcccaggtggtcaagtcattgaggggggagaagttgacgattaacgggaaatcaagggcccagggagctcaagaaatccagggaagacaagtaggatatacctgcgatgttaatcagatactaattcatgtagtatctgtgtaggtaataaatccttgcgattgtcagagacatctaggaggtcgacgtgtcgcaagttgaagttctccacagccaagctctaactaggcgctgcggtgaatagctccgagtccacaattatagcttatagttagcaaggatagcaactgtacagctataacggttggaacatataaaaacaagcatattttcaaattatttagaatgcatatattgatgtatttgatatgatagattgaattgatttaaccacgatatatacatctgaccggtagatattgtctttcccccaggacatactacctacatatccatagatgtattcaccctatttgcatgcatcaatatgtcccaagtaccaattgtgtgctgcagtatccggattcaacgtccccgcatttccagacttcgagcccacgccgacaatgacatcaatatcagacgaggtcaccgtcgtattgtcgccactagtaatccagtactcaggacttgcgtggctaaagccaacagtcgcgggtggcaccttaggcaccaagtcgtctgtatgtgtcactcgccagagactgccctggtctgtgatatattgagctagagccttgttacccacccgtggctggccataagtatactagtctcattgtgagtatacactagcaattaaggcagatttccaaacatggtacttaccacacttggttcatatccgccatttcgaagcacaatacctcccaacgtggcaagggctccgccatagctgtggcctgtcacgacaagagtgtagcccgagtatgttgcctttgcggccttgatcttggatgtcagatcagctgcgacagcctcccaggcttccaagaacccgccgtgggcttcgcaaccgctgcagatactactagcatcggtgaagccaaagttgatgttcgcgatccagttactcagtgtgcgactgcctcggaatgagacaacaagtagcttgtttgtcttgtcaaccgcgaggaagccggcaacatcaccatagctggaggtcctgaaaggtgtcactgtattagcgaacgacttgtgaatgacattggaagttggtctcatactcgtcaaactcgtatagagtagttgtgtcagcggactccaccaaggggcagttgccttgctcgcaagataccccatcgccggtggagttgctattgttcgtgcagtatgatgctgcagcccactgcgagaacagggtcaattgaccgagcacatcagccgacacatctattgcttgcgtcagttggtcaatcatcggatggcatgaacaaaaggcaaacgcatccatacctcgaggaacagaacgagaaggagcagcaaccgtcagcgccgcaagagcagcgatactccaaagacgaccaagaagaagcatgatgaggatctctggagtagggctttctcaacgggtgtgcatacacgtcaacacaaccacgcagacacagctcccttatgtatgttcggcgagtccaaatggatcccgtatagatcccgaagtccttcacaaatcaggacagcttgaggggcggggtatagcgcccgttctctcgtatattaaattgttgccggactcagctcaatctccgggcttatggcgcatatttcacgcgtgaccggtgggattccggcgggatcgacatggaattcatgcaactgttgagtttgtcaccgggaaatgtaacccctcagagacacatcggctgagtagatgatagtctgcatagtaaaatagcggagtatttcgtccaagtcgagattagggctgtgagtgggacgcttagttgcgccttgtaatgcaggacaaagttttgctgttgatttatttcttcatgcgatataagtgccgtgaagacgaatattttgggctctttgcatatcgggtagaaatagcttgcaaggttgttgattggtttctgcttgactgctccaggtggtgttcgacgatcttttctcatcttatactaatggcccgttgtggcagaagaaattccagccactcgcttccgcccgtgatcgtatctgtatatgaactgttggactgttgaactgttctagaggcaacgtcgaactacgacagtattattaaacacgtgtgatcattagaagcgtaaaattgatttgactgtatccattccattttcaatggaggttttttttggttatttctttttcccttttctctcttgagctctcgcaaagaattccattattggagaagcccttcttcgccagtcaaagccgtatcctgttcatcatcgctgccagcaaagaacctcgggccctcgggacactcggtgcttgggcccatactaggctgcgttagcgtttcattgtcatgagaatcactccccactactggtgagactcgatcttcatgccctcctcaactcctgtcataccggtgtcctgtccatcttctgcgccatcaccgttgaggataactcggggagggatagtgtagccaggaggcagtggggtgccaggggtcacagcaacgatgttgtcgttctcgtcgaccatctcgaagttgtatcgcgataggagatgggggatggcagaaagttgggggccgtagcgggcagtgttatcgtacagctcgaacagcgggacagccagcagtttcatgttctttgggaccgatagaacctctagaataagtgatgtgtaagcagtgtttaccgcccacgtgaggcatgggttggaactcactcttcttcgggaggcggatgaagtacaacttcttgcactccttgggccgggtgacatggccaggcaggaacgggtacatgaaagtctcgaagttgggtcgccaccattgcgcaagtgtatcgctaatttcccagtcatcattaacgccttcgccagagaactgagatcccacaggtgcaaggcgctcgttcaggcgcttcttgaaaccttcaatctcatcatcctcaggttgcagataatcacctggcctgaaagacaattagcagtgaactgtgaatttatgcaactaaatctcaaagaactcacagcttaaagaatgcattggcaatctgcagcatcagcacatggggatggttgtgctcgtggcacaccaggattccctcgcaggttcgtcgcattccatggaggccatagtgctcttcaaggcgcttgagccgtgccagaaccgaaggatcctcttccggctgtgtctccttggtgccgaaggtatagttcgacagaggatacagccggacagtctccggctgctgagcggtgaagtccttagggacaatgggcctagaaggtttgtgttaggtcgcattgccatttcggagtttcatccatactacttacggaaatccactgacaggagcctcctgcgtggtagtagccatttcgacgaagcaattgttgttattgtcgagaacggcgagctgtctaaagctccgatgtcactatcgcttatcagcgttgaccgccttcccaagttcaactgtggaacatcgagtatacaacttagtaagaataactagttaactaactaactatagcattatttggttacttgatgtaatttagagggcatgctactatactatatagctgtatatataaaaaaaatagcaatgtcgaattaatttaactctgtggaccttgcggttgagaaaccgatgactgactgtatgtaccttttatatgtgaagccctagcaaacggtacatttgacggaaaccctatgttatgttgtacacccacttgtcaaccttacaaggaccgggtgctataatactcgtctgaacgtagtttgtttgattattatccttcactatatccttcaattgacaaacaccccaactctcggatacatgcaacccagaccaacaccaaacctactccatgtataccattcatagcttggcatcaaaatcctcatacacgctcaaatccatcgcaggaacagggccagcgctaacaggcaggcttgccttgaaggttgacacatcggtgataatgacaggcttttgggcctcgccattgccattagccgcaccctgaatgtcactgccagagccaagacccagctcctttaactgagcactgagtttctcgtccagcgtctcaaggacgggctcgaacttctgctgcaacaggccggtctcggtcaagaaattcttcacagcaaagataacctgggacttgtccgccgctgtcgtgtcaaccgaatcgaatgccgtagtgaagcgggcagaatccacgatgaagtctgcggcttcgaggtgcttggtggctacttcgataaggcgcgttctctgttcagctggtttgggctcctcaacctgcgcgcctgcctgggcgttcatgtggatggcgagcttggcgcgtgtggccgaagaggggtcgatgtattgctggtagaatgtaacgagatccgccttggtcaaggagcgcacattggctgcgtcggtctcatgctgaaggaaatcaaagcgctcagatccgatatgcgaccagtaccggccagtctcagagcctaggttcttgagtttctccaggcgcttgttcacgacgctgcgcttgtaaccctcgaattcttcttcgggcatcttctcgaggatggaaccgaactcgcggaggaaattctcaatgcgcgattccagataaggtgccgtgcgttcactctggataatgatccggtagcccatagtgatggcgttgtagcgtgcgccactccacaccacatatccgagctgttccttgctgcgcagctggtcgaatgcaggttcgtcagtcagctgcgcgaacagctggaccttcgatcgcaggacgtcgtcggcgaagagcccgatatagaggaagtactcaatgcagtgattgacgttggccggatccttgagcaaccgggggtagacatagttggcaccgggcggcaagatcatgttgcggcgcaagtaccactgcgatggaggcagagggcggcctcccagaatcttctcaatagagtcggtcatacgcagagcatcctccttgtacaggtttccgtgggccagcacttcgatgtgggtctgctcaagcagctgggggaagaagttgaccacatcatgggactcaacatgctccagctcttcaagatactgctcattgatccagctgcgctcggcaagaagatagcgagtataatccccgacctggtagtaaggctgctggtactcagcattgcggaatgcccgcgccaagcgctctttgataatatcgaaccgatcctggttgacaactagcccatgcatagtgttgagtactttgtccaacagaacggacatcttgtcgttatatccgctcacggaaatgtccaatcccaaaatgttcgccgagagattgtagtctaagccagcaagctcggcgtcgtaggagtattcatctagcgaatcccgaaccaactcgctgtacagctttgttttgatgagattgccaggcgtggcccacaccaatgaattgcggagcgttatctcgacactggccttgggcacccagaaacggtcatccttcttgaaccatagacgcacccggtcgtcatggcgaatcagcttagggttgatagctggctcggcaacctccttcttttctaccgagagtctagtcggtacaaattcgttcttgtgaggcatgtgcacgttggaagtacgggtagcctcagtcgactctagagccttctgaagaccacccaagaactcctgtggaatcttctcgaccttgtattcggtaccataccacttctccttctgatcccatgtacccgggaactcctgggacacaacgatcagacggaagttgtcagcccgcagatagctgagcgccttcttgatcaggtcagagtcaaatcgtcgcaataaagacccgctcagaagccattcgttaggcagtgacttttgcataacgctgctcaaccggctggtgaagcgactagccggggtcttctgcttgaaccggaaattgacctcggcaaggttcttcatctcgtcgaagatccactgctcgggctcgcgttgcttgatcatggcaatatactcgaagacgacgtttgcgacttcctggtatttcttcagaccttcgggggtcaagcgcaccgagatagtgaaaaatgcagacccagcgcagacaggcatggcgcctgcagacagaccattggcccaccccttggtcttgaggtaagaaagaacactgcccgggccctcatggccaatcagatggctgatataacggctaggctgggtttcatgcatctcctcctcatcaagaaaggggaaatacatatccatggagcgagtatccataaccggcttcacaaaaacctgggtgcacatgtccttctcagtgaagggctgaacaccgtcccagcggttcttagccaggttcttgttctcgacatcggaaaagagctcggagacccactgctccagggtgtccagagattctcgtcctaggacaaccaacttcgcccggttggccgagtagtgcttctcgtagaagcggatgaactcactgcggacttccagaccacgtttctgtggatcttctttcagggtctgcagattaccagtcgagaagtggctgtagggatgtttagggtttgaaagcgacttgttcagttgcatcaaacgccacaggtcactttgaaggttctttttattttccgaatccaccgcctgcaactcccggtctagggttgactctaggaaaagcggggcaacaaagaactgggcaaaccgatctaatgcgccgtagaggggcgacttcccatctaatgcactcccatttgacacgccattgttatcattcgtctcggcaggggtgctgtctccactggatttcggggcactggagtcacctgtggcggacacttcaaagaagtagttcgtttcagtggcggctgtgtaggcattggatgaaccagagtgggacgccaagtactggttgtatgcattttccttcgggtactaaacaacagggatccggttagcattaaccctggctaggaatatggttgcagtggtaggttttaggttgtaggttgttaatttaccttttttgtgcccataaatagcaaatgctctacggcatgagccattcctggcatatcatcttcatcagagaagttgccaacattgacattcacggcagcactggccttatcggtgtccgggtcatgaactaggagggcctctagcttgtttggcaaacggatgacccgataagaacgatcatcaagctctggtctctccaagttctctgtaatacgctcgatttgagccatggttgggggtgtggcggtgaagtttggggttgaatgggaggatgaacggcgggtccaaaggacggaagaaagaatctgtaaaggtacgggccgcgctgaacgaatactggtcacagtaatacgtgacaacaaatcgggacaagggcgggttgagctgcgaatgagacctttgtgacacaggtttgctgcagaggaccttggaggcattcagttgccgaggggagagggagaggccaatgacgtgactgataaggtcaatgcacctaggaattccagagggtctaagaatgagacgcgttaatatatgcttcgatatatattgagtgggattataaaccaaatggaggggcctcggggtgatggatgttgtaaagtcgactgggagacaagcgatgttgatccagccgggcctggtggaaatactgcccagctactcgaggcggtgataggccctcgtagccctaatacgcgctctcatctaccgatggcgtttttccaaacaaggcagactcgtatccgaccaggattagacttaaaaatataacaatattcccattagcagatagctacatacatcgcagggtcctgggtggctccacgtcgaggctctacctttccccgcagctccgcaggccaaaacacaggggctagtggacacagtccccaccattatatcgagctatcacatacgtatggatccgggcgcttagcagttggctgcacagaggtccaggttaacactagtgtcggagttgcagttctttgtttggctgccaccggggttgacaccctgcgcccagcagatgttcgagcaagttgtgtctgtgggccgcacgacaatcgacttgccggagaatgggtcaccgaagacatctgacaggtcgtaccaaactgtgcctgggtccagggtgtaggcaaagttggtctgagggctgccgttgtacagaccgttgtcaacggtggtgatcttaagcgagatgccaccggaggcactatcgtggtgcagagcttcggtgtagctgccacccgccgggatggtttgcttggggccgacactgccaccaacggaccacaggtagactgggaattggcagtggttggtcacgatagcgttgccaacggcgctagcaagcggtgccatggcggcgacggaggcaataacggcagtggaaaagtgcatattggtaggattcagttggcttgaggtcaagtaataaagtctgttcgaggtgatgagaatatctctctcaggtaggattcgaagccctttatatagtttccttggtggattgagcatcagtttccagtctatacctggttctcctttgatacgagcataaactagattctaaaaggattgctaatgggaagaatgacggttacttaccaaatccaagacacctcatcccaaatcaacctattgaagccttaaccacttgggcagtggtcaggccatccttccttttgtatgatcttaccaaatccccgcatcacacggccaacagttttccaacattgatgtcagtggagatgcgagagataaaagggtccatgggtgtagcgaaaagaatacgatgtctcagagcgctccgacccgatcattggatgtatacattgcataggcaagagcaacaattatgagattagcatgagctttctgcttatgcatgccaagtgtggagagatagaaaaaccaagggctttctggcataacaatggaacgagttgtgtcacgcctggatttctggggtaaaaagtgagacattgttacatacatccagggacagcacgcagatcaacgccatactgagaaagtaattatacgatatgtatgtctaaattgagcagaaatcagctcatactcgccgctctgtcttggagactactaagctctagagccatggttggtgatgtgtcatagtgaagtcccaaatgtctcaaaactccaaaactgtgctgatataactgctgcagaggggcccagggacttcacacctgacgtcttctctgatggcggtggacgagaaagtattagaggcgacaaatatcaaagagagaaatgttttccacaacccgttgagaaatgataagcaaatatagtaacaggactggcaagataatttcatgtcattactagggtatgaaaagagggttcttcgataacagaccgcataacaccatgtacagccttgggaattctacggttcacgctcgccgaatcgatcaggaaccagtaaaagcaatcacgaatcttcgtctgagtcctcctctgtccggtcagcacgatcggatatccacttgaacacttcctccttatgctcgtcaagcatctcgttcaggtccgttttcggggaatgaaccagctgtccgtagcgcttggaaggccgtcggtccaggctagtccaaataccatgggagtctgaaacaaacacaagggagttctgaaatgaaaataatagcgtgagtaatgcatatcattgacgaatatattgtgggtggcttacctcgcggtaccacttcgagagccacgtctgcgtctgggatgcgaccgcgcggacggggtctacagacacgaaggagatcacgccgttgacacgcttgtaaaggttttctgcttggtaattagcaaagctgcatagccggatacccgattggcctaaacatacccctgttgattagcaagttcgacacgccaatgaaagcgttgccgacgccgagcaggaaaatttcggttgcctggttcgcactttggtaacttgtcagctcaatattaatcaatgttcttcgccggtcatcgctcactcgatgtagttgtcccacaagtatccggcaagctcttcggtggcagacgggcggtcctcgtcgtccacctggtatttaccggcagtctaaacccatccaaattagttgattgcccgtataaagggttgcatagcttgacttacctccttccgagttacgaacttgggaatgttaacatcgatcaccgcgtagcccttgcccacgatccatttcacataatccgagagcgaatcggccttttgttatgttagcggacaatctcagtcaaccatcttgggtcacgtaccagccacacattgtgcgcttccaacttattggtcacgggatgagcctgtcccacaatctcagggctagatactgtcaattatagctctggcggttgattatcggaacacttacggatcgtggaagatgacaacaagcggcacacgttcgtgatagtttgtgctgccagatggtgagttcaggttaggatatcaaggttcggtgcaacttaccttgccagaacttgtttgtcaaaggacttggaaatggcggtgcgataaatgtggagcggggtgagcttgcaggtttcatacagctggttcgactggtgaacacggaggatatctagagggcttatcagctctgttgagtaagagatagtctataattcttaccgtgaagacgattcgcgtagatcgggtgagcagatgtcttggggtacaggcgactccaatactgggattggatgctcctcacccggcggactgttgcgaccgcagagtctgtcggagaactgctcaacaaacggtcagggggttcccccataagggtcttggtcacagccagagccgacttggagatagacttgaagttgtatccaccctgtttcaacgtcagatcaagcaagcaacaatttggagaggcaattgacatacctccaagcaaacagcgatctttccattggccaaagtcatgagcatgtggatcatttgggcataacaagctggcgagacaaagcaggcacccagtacatcgccagcggcagcatcaaacccagcagcgactgtcatggtcaataactctatactagataaaaagagggggtatgctcaccaatcaccatgtcgggatcgaattcttgggcaatgggcatcaccacttcctggaaggcgaacatgtaatcgccatcgcccataccctggtcgggccatggaatattgacatttctaagaagcgtgagactttagccatttcattcatatgcttgaggaaaaactcactttccgactccggcgcctgagccacattgatctgagtctccagcagggcctccagggtagaagcgaccgtcttggtagacatgcatggaaatgtaaagaacattagggtcctcgtaaaatgcttgctggatgccgttgcctaagatctgtaagcttggattgttttcaaatgtcatactatgggtctaagcataccatggtgaacgtccctagcacaagttagtatttctgcagtgaccaaacggtgatgtggggtactactgaccagtcaagaatcatgatcttccggcaagcgtctcctagtctattttggcaaacgcgtgctgcaacagacacattgttgaatagacagaatcccatcgcagaatcatgctcggcatggtgaccgggtgggcgaatgacggctatagcatttttcacctgacgttgggcgacggctaagcatgtctcgattgcgcctccagtagacaaaatggccgaagcgaaggtcagattattaaagtagatggagtcacgttccttttcgagctgaataagttcatcgttggccatatctattgatcgagtcagtgaatctatccaggccagcttttccggtagtagcaagacatacctgttgtgcttcgaacaaatgcgtagtgcgcttcatcatggacgagggtgatttcctcctcggttgcattgcgagcctggatccgttgcaaggttttgggtgccaaaggccgactcgattctgggtcgtcaacaagaccggcgcgacataactccttgtagatgtagtagatgcgtctgggatcctctggatgaacgtcactctgtggacaaacctcgcagtggtaacgcatgcgaggatcataacaaagtcctgaggcaagcgacgccagtggaagacccgccttagccatgacctcgtcgtcagaccagtcagagtcgggctcaactaggctatcacgttttgacaactgttcgacggtgaaaatatcaccttcgccgatcttggtcaaatgttcaggaggggccattccggtggaggcgatggccaccggaggttgagattgctcggagccaggtgttaaggatgcaggaatcgcttggtgaatggaagaaggaggaagattgggagtcgggtgattgctgagatgcgtgggaagatggaatcggtttgcagtcaaggtggaggtggtatgggaatcacccataactgtatcctcgtcttcgtccatcatgagaggggaagccgcgggaagctcttgatataattcaagcttggctcttattagctcattaccaagaactaccacaatagaggtgttgagcttgtgttggcaatcttggagctcaatatcaaactaatagtgattcggttgatgttcctggtccaggctgtcgaatgcgctttgcacagcagaataatttgaaatatatcaatcggtcaaatgttccacttgttaaacaaagattttgtttcaccaaatattataggaatgtctgaaggtgcgatttgagcaagcatacggtggtataccaacgtctcctgccgtatgttcgactgacgctgcaatgcacccacagtatgatgaagcaagagtgatcttcaagtgaataatttctaagagagattcaattatagaccttcatgtagtgggtaaaaatgaagaacagaatccaagtccactgagtgacaaagagacaagggaatggatcattggatcccttttgggccagtctttcttattgccagacattcttgaagtcaccgccaaattgaccgccgctcggaatggattggcgtgatatattataattggcggtgagcatttagtatgtactgacttatcgttatcaacaaccttccaaggtgcatggataagaacagtcggcctatacggcctctatacttgatgagctaggtatttacatagttctaaggttagccagaggtgattcagctatgacacattgaagatgatgacttttgtatgaattttcttggatatcttctcttatcaacatctagacagaaggaatgatagatcacagaccatggaatttggtggaaggcataatgctacaaaacgacatttccatatataacatgtgatgtacccagttatatgtttgtacataggtacatatgcaggtagttaagacatgcagcatacttccaatggtcaacatgtaaaagcttaattttggcaagtgtgaaagtgcctcgggattagattgattgtatatgtatatggaggcaaagccattccaaccaaaatgattacgatagtacagctctatagcagattggagaaaatgaattggaaatggttggtttcattaaatgacgttatcatcttgtttttttctaccaggcggagtcctcatgcacccatatccgtaggctgtggaacaaggagctcagcaccttaaagaacactcttgaccccatgacggggtcctgattcctactgggaatccacaccggcaatgtaggagatgaggtcaacaacacggcgagagtaaccccactcgttgtcgtaccaggagacaagcttgacgaagtgggggttaagggcgataccggcggcggcatcgaagatggaggagcgcgagtcaccgttaagatcggtggagacaacctggtcctcagtgtagccgaggatacctaaaatagtttgtcaatatgggttgtagacgtgatcgaaaaaaaagataactcacccttgagctcgccactctcggaagcggccttgatggtggccttgatctcatcgtaggtagcacccttctcaaggcgacaggtgaggtcgacaacggagacgttggcggtggggacacgcatggccataccggtgagcttgccgttgagctcggggataaccttaccgacagccttggcggcaccggtggaggaggggataatgttctgggccgcggtacggccaccacgccagtccttgttggaaggagcatcgacggtcttctgggtggcggtgtaggagtggacggtggtcatgagaccctcgacgatgccgaagttatcgttgataaccttggcgagaggagccaagcagttggtggtgcaagaggcgttggagaggacattgatatccttggtgtaagacttgttgttgacacccatgacgaacatgggggcatcggcggagggagcggagatgacgaccttcttggcaccacccttcaagtgggcactggccttctcctgggtggtgaagacaccggtggactcgacaatgtagtcggcaccggccttaccccaggggatggcagaggggtcacgctcggcgaagaaggcaaccttgtggccgttgacaatgagaccgtcatcaacgtactcgatggtgccgttgaactgaccgtgggtggagtcatacttgagcatgtaggcctattccgacgggaggttaatatcgggtatacaatcggttgggttgaccagaaacatacagcgtagtgagtctcaatgaagggatcgttgacagcgacaacctcgacgtctgggttgaggagactatattgaggatgggttaggatggttctcgggtcattttgttctctctctctctctctctctcctcctgcgggttgtaacttacgcattgcggaagacctgtgatgctgttagtgactgaagctgacctgtgatgatccagagaatgacttacaatgcggccaatacgaccgaaaccgttgataccgactttgacaaccatgattgcggtttactagaagctgttagctcaggtagaggaaggacagacaaggaaggatagagaatggatggacgtactgtaatagtgaagtaattgaagaaaggggaagaagtgggatggagagagaaaagaagaagaggaaaaaatatctgggggagggggaggattaatgaatggatgactgacgcaatggacagatcacgcccccccgtctcaccgaatcaaccctttcactcccacacagcccgtcagatcagaccgagctagatttcccgaatgttgccgttggcacatccgcccagcaacccatttccggtttcatacaccggggaaagcaggaagggccacgatattggggtcctcatctgcccctcggtagctcccgtctaccaataggagcccgctagacccaactgctcttcgggttctcactacgcttcggagctttctcttgaatcttttgcctattcggtgcctatattcgggtatacggagatgagcacgataatcttaggtacaaatatctgtaggcgttcccgaggttgactaaggaagctatgacgatgtggtttggaggggtcgatgaggggcaggaatgtaagtgatacaacataggtctacaacatatagaagggattgtccagttaaacccgtagaattaaatatatcattattattatcttctttcgaacggaaatgctcgattcctccactttggcgggccaaccgtgccgcttaaaccactgcggtggacggatcgagtatggtgatctaacttggtggctccctccgccctgaaaggagtcaccggtatctcacatggggccacgagactctcatggtttttttatttgttgattggaattatttcatttgagcttgggagggatttgactactggggtacccaataactattctaatcattggatgatgatcaaatgccgcaacagcaccaatcacaaaatgagatcctacaacctgtggtatctcactggtaatccctcatgcctaggtggtagctgtgggagcccagacctcatcagcccatatcaacgtaggatgcggagccgatacaccagtggcgcaatgtccagatgggtgccacgactgagcgtccttttgtacaggatctagatcgtacaatctgggggatggcatgaccacaggattcaagaaggattaaagatatagtccaggcccgatccagaaaaggagagtctggacttgaaaaaaaggatgaattatggattatgatacaatggggagaaatgaacagtgtgctatcattcatatcgaccatcgaatacccatagctaggggaaatcaattgatggcctagagcaacccagcgtttgtatttattcctccttgacaccaccgcgccagttcttctcggccgcctcgatggaggccttatcgctcttgggtccgccctgggacatgaagccaccggcggccttgaagggacgggcgagatcaccagtagcgggcttgccgaagacgtagatcttggccaggttggactcgaaagcgcccttgagggggatgatcgactggatgaggagggggttggtgtactggaagtacaggtgcatcacgcccatcatgccgacacccatcagctggctgcggatcagctggcgcagctgagccttgtcgtagtccatgttggtggtcgtcacgggcttgggctcctcggtgctacccatcgtggggggctcaacgtacttgagggttgtcatgtctgggggtatcgcgttagttttggtttttggtcatggagcacgcgatcgatcgacatacccttcttttggttgatcttcaggtgggtgtacaggtggacagccaggatgagaagattagacaggatatagcatgcgcgcaccagcatcaagacttgagggtcctcaaagggaaccttcttggacagctgcatcatcaccaagatgatggcgaggttggtactgtgcgaccatggtcagtttccgcaaagatagatgttcgatttgaatcgaacaattgtcgatcaagcatacatttgaggagacaccattttgccggacacttggacacttttcgatacggggaaatcgttgagtatgggggagacaacgcgaacaaaattgaaagccgcgggccacctggcatttctggaaggtcagggagtcggaagaacagttatcccgacgcgatctatccgctatcgctatctgatggcctgaggcattttatcttgtagcctgatacataaggctagtatatcatgtgacctccccctgccggtagctggtagctgtgatggtccagcttcaaaccagaccagcttatttgcaaaacatcagcaccaccacaccagtgaacttatattttggcttagagttacacaatggtgtgggttatgacaactacaggggtttcgtatgtgaatacggccacggatgccggagacctccattgcaatcggacggctcaaggccacacttggcttccatcatggtctcctcgaataccaaaactcactatggcttctgtctatttttgagatagagaaaaacaagcgataaccttcacagcaactgatttctagatcattcaaatggctccacagagggccatctatacaggcaagaaaccgaatgctgagaaaggacggttcccctttgggactagcgccaagtgtctttttggcacagtcggcgcctggcacattctgacttctccatccatcaacaacgcgcgtattttccgcactctgaatcccctccacgtccccaccacggccagatcgtctcgatttctgtttctatctgctgtacctacctctgcgaccgtcttcgcacatttatttcgcaatggctggtggaaagggaaagtctatcggtggaaagggtggaaagggtgatgctgcggggaaagcccaaaagtctcacagcgcaaaggctggtctgcaggttagtgggatcatggcttgtctattacttggctaggaatcatttcatctgagagtggtaaagcgatacgggcgatgagttactcgatgaaactgcctcgaagacgcgtcgactcggtccctcgttgctgttcgataaggggtagtttctttcgctatacgtgccgtcgcacgccctctcttccgaccatgttttcctcgaatcgccaacggtttcaaatgacgcgactactaacccattttcactctccagttcccatgtggacgtgttaagcgtttcttgaagaacaacacccaaaacaagatgcgtgtcggtgctaagggtatgctatgtcgcttggacggatctccgacgtgacctgtcgctaacactttttcccacctagccgccgtctacgtgaccgctgttcttgagtacctgactgccgaagttctcgaactggccggtaatgccgccaaggatctcaaagtcaagcgtatcactcctcgccacctccagctcgccatccgtggtgatgaagaactggacaccctcatccgcgcaaccatcgccttcggtggtgtccttccccgcatcaaccgtgcactgctcctgaaggtcgagcaaaagaagaagggtggcaagatcgagctctaaatcaacctctgaaaagttccggaaaaaaatgggctggcagcgggagtagtcgagacctcaacacctcgactcccagccctccgaccaatcccggccgcccttttttttcagtcctctcgtctttgtttttcatggcgctctactttgatatattttttctgatattccccggtctttgctttcaaacctgcttttttttcattcgagttcatagggcgctgtaatgggaaaatggggatatcctggtagtgggaattttactgattcgatgtgcttcaccttcactaactatgtggtaattgtaggaattggagtaattgtagaattatgtattgtagattttcacgcagtcgaattccaggataatgcttccgtgatcggaccgattatcacattcctgaggggtcaaatattgatagacacttgaccttgcatataaagtcacgaactttgttggctccacgggggatcgacagggacaaatatgcataactacgataaacaacgcaacggaaccgcgtcatttgttcttggcatctatattttgggttaataggttcgtttttgctattggaaattcagattggaagtacagagtagaggttctattgtcagaatatttacacacaactatgatctcgactcacctactggtaggatagaagtcaggttgaaggtagatggattgaacagtgagaatctgagtacaaaggcaaaggcaatggaaaaaaaagaaattgctggactgcaaagacaccaaacaggaagaggaatcccttcagaatgggagttggaaaaatatatcaacatcactgacacaggaatgcagaaaatgcatccacactgcataaggtagatctgtagaatcggcacagtcgaaggcagcagaatcacaatatagctgtttcagaaacagcagtggtccctgatcaccattccgcgagacgaacgaccaaggggaaagcagtcaaagcacgcggaaaagaaagcaaaaaaaagtgaaaatgaagaaacaggcatgtcacaaccgccttacccggacagatcgaacatgaatttccccgaaagattaggggaaagcggttgtcggggtaagacgggccagaaacattaaaacggatgcgagtcaccccatgtacaaactaaaacagacaagaatatgcaaaatgctggtattgtcgtttcttctgccatcggcaaaatgtcttttgtgtcattcttcgtatgcatcccatatcaccaggaggcgttcggggtcgtggagttcgttccgacacagcataaatagaaatccatggatttgcatgcaaggcgcccgcaatatcagaaagtgttggaaataaaaaaaatatcagtccagaacaagtccagagtcttcttgaaactgtgtgagtcggggaaaagttcaaaagcgttcatccaaaccgcgtgtcttgggctgccccaaaaagaaagaaacgtctaaaacttggctagatcagcgaaacagaggattttctggtctttttttttgtgttgttgtcatctcgtcatccctcatcgaatcgtaagccggtaattcgcagaacagggactcgtaatacaagtcgtattcatctcgcggcaaatcagtcggatgctggcaataaaaaggggagtcgccatcttcaataaattcgtccaatgttctactccacaatgatctctactccggagttggtgcggagttcatcacttccgcggctttggtggccgttctgacggcgaaacccggggcccttgtcgggggtcgggccgcggggttggcggacgggcatgcgctcctgctggccgtcatatcccatactcatgccacggttgcttccaatggcgccagcgttggattgctggctgtcctgctcccaagagaacatgcctcttaagcgacgagggctcgagttggggccaccgataccggtgccgagggagagaccacccaggctgttgaccagcaggttgtcatcacgctgcatgccaagagaggagccagactggacaggggtgagggtcggggtgttggaagtaccagtgggcgcaccctcatactggaggcgggcgccgttggactgcaacgcggcggggaagctagcggaggaaggcacgggcgaaggagtgtaagatctcaggtcggcaaaggacttagcagcccgtaggttctggccgttggcgaagttgccaggagagtccatcacgcccagaaagcccgagttctgtccacgcaaggtgttgaaagtgccagggccagcctcttggcgagcctcgccgaagtcgatggtcgccgcccggttaaggccgcgacgaccactgtctgactggccagagggcgggattgaggacgtcggggggctgacattggcacctgcggcgatcttaaagacttgcacctggcgctgttcgccgctaccacgtgaagcatgtcccaagcccatgttgtgggccagggtgtgaaccgtgcgacgctgagagggggtgaggttgtgggggaagatcacggaatcgcggacagtatcttccttaaacaggagtagttgggagtagtaggaaagggtctgggtgtcgttcaagtccacatctattaaaaaagacatggttagcgacaggtcgagatttcaataaccttaaaacgaatgtgttaacgcaccaattttttggccacgctgggacacgggcgaaggggaggtggccgggatgtgcgaggtgagtgaagacatggagctctgcgtctggagctgcggaccacctcccatcgggcggtgctgttcttccaactggccacggcgttcccgcttctcacgctcgatccgttcgcgctcctgcaggggaagcatcttcttgtattcgactcgtaatttccgaccctgtagctcaaagtggttgagcacctcgatcacggttgctgtttcctcggcggaagtgaagttggcaaaggccagaccacggaagacaccattgtcaaagtgatagttaaatgcgtagggcagggggaggttgagttccgtcatcaactgtaccaactgttccttctttacggcaaaggggatattcttgatgacaatcgcggttgggatcaattcatcgtcatctgcagaggacgcggaggcttccggtcgcatcgcgctgctctgaatgggaccagggcccagattcgaaaatgcttggggcatattcggttgctgatccaaccaagtctggagaagcctgttagtacttttttcctttttcgcctttttcgtacctttggacgagggggtccattgtcggataagatcaaacataccgtggggaggccggcacgtccacgggcattaggcttcaaactggcggaggccgagcggattcctccgagagcttgagcattggcaaacccgttggggttccaagtctgcgagccagatatatcatatccgtagttgttctgcaaggacgggttcaagcgttcgaggcgagcggactcgtaacgcatctgatcttgctcatacatgttggtcggcatagggccgtacgcatcgaactgtcgagacggctgacggtgtaggggttgttgatgcctctgagacccaggggaacgcgcagaatgatcgtgatacatgtcttgttgataactcatcgagaattccggagggaggaatgtgaaaatccaccaaaaccagttttaaggaaataattgtcactactccaccatgagagcgacgcaaggcgtggaagttgaagagaaaccgtcgagggacgggattgtgcggatgttttgggggaggaaaactttggagtaaaagccgatcggagggagattctggggcggagaacgagaaaaaaaaaataaaaaaaacgaccaaaaacgaccaaaaattcaagacacaaatccaagacagaatatcttcacgagatcacgaaattaaaggcttcgttttcattcaaggggctcttgttgctttgctgtttctttttttccctttggccgaaggtgactggttccgtgtgttcggggaatttccctttggaaactggctttcccaatatcaaggcccagatgaaggagacaaaagacaagagagcggggggagagagagagacgaaaggaattcaagagggaaaagcggtccacaggtccgccaagaacggaggggagtaaggaggtgagttgtagaaaagacacaggcacagacacagagagaggagaggagagaagaaagagatgcgatgatgagagatcgagtcctcaggcagaaagcaggtgatccgttagatatgcagctgttttatattaaaccagtaagaaaaaaggatgaggaaatgccatacttatagcaacttatagtcactttatatagtccacctctctagtttatattagatcttcgacttttattcccccctggatctttatgtggactcgcccaatgagattataccatttaatcttcgactgcataaacaagtacaccgtacattgcaagtctaagtacggagtcccggagtggtagatattgcttcatgcttgaatttctagtgtatccccttttcctacatccttctggaatcatcagcatcctagatcagtcgtttccccaaccgttccagtcacctgagtagctccttatcccaattccgaattccccttagtcttttcttttaccaaggagccggtgcctcgttaggctcgtcactaggcgattttagaggaccccgctgtggtggaccactacttagagcttctcatccctgagcagattgggggaaagtatttcgatttcacggagtacggaataatactccagtagtccagtactccgtacttctgacatactcttgctcatttgcagtcccacgggttgcctgacgtatagaagtcggggttcgcgccctgcctcgtgcttttgcaagggggtgcactgcactatactgtatgttggatatgtgattctctatatttgatacaccggcttgcactttgcatatggagtatttatcatggactccgcttccttttaattactgtacgttgtactcccgtactccgtattatctgaatgttccatctccttcagggggggttttctattattactcctgaggttagtttcccccccctaatttcatttcgccccatccttccacccaaggcgaatccatgactcgccaccttatgaacaagccacctgagttattttaacagctctccctaatggttcggcccagtcggataagccaccttattcccccatcggctgctgcagctgaaagctagtatattgtgtcccactccaggaaattggaactttcgtccggtacccacgatccgcgcatcccccgtttctagcgcatgcgtcgaagctcctcagaggctcatatcgttcagctagaacccgctagacgctggttaaaccatttagtggcagtgtcagatcccggtcgggtggagctccggacctcatgtggccgagctagaacccgctagacgctgattagaacatttgctggcagtgtcagactcagatcccggttgggtggagcgctggagctcttcggctcgtggttactaccacaatcgtactcggaattgacatccccgtcttccgtacggagtatggtcgctgaattcagattgacgctagaaaagactacgggaattttggctttggatggctctgattcgctccggttgtcattcccgtaacaagtactccgttctccgtatggttcggggaggttgacaagagggatcgtatatttcacacactcaggtacatctgctgaacctgcacgaccttctgggagtttgcgatcagcgacccaaacccaagggaaaattatggtagtggattgatctacagaggatcgggtcgggtcgcaaggacatccgcgtgcttcaggagaaattcgtgacttaagagggaaagcaaccctggtccctggctagctctatgaatcctaacaacaggcagaccttgaacagaggcaaacagcccctgaggttcatatccacacaatttgaatgaacggaggctaacttggacatccgacatgatcctcaagcctaggaatagaacgataggtagagactaaccacagatattgaactgcaactcgtataggaccagtctggaacatcaaagaaaaaagacaaagaaagtcagacagctgcaccaggaaaaggcaatatccagatgtcatggctgacagtaggctccccctggaaaataagacatccttctaacacccattcttgatctttgaactgagtcaaatttgtgtccgtacgagccattcttgaaccaagataaccggagtcacggtcaaagacatccttgaaacgacaggctgtcagtttcaagaagaaaccaggaaaggcccaataataacgagactaggccctggaatgaggcctgagaaatcaggccaagaagcaactcatcttgaacgtattacaacatacatcgtagggactgatgcaaggcgacaatggaatatgtaatattccaaggcaaagccgtttgaaacgttctagtgttgcatgctaaaccattcgttgatcgcatgcagcattatgcagccttaggtccgctccagtcaaaatatcgcgagttttctacctgtagaatggccggtcgcataaccagccctgttgtgtctttttgatagtcctattagatgtattttttatcgatatcttctttcttaagtcttctgatgtagacggaaaacgcggaaaaggcatgatttgacttttctatgtataacctttgatattgaagtagtaccgtagttaaatatttcatatattgcatattaactacatgcatctcttgaagtaattcaaaatcaaaagatcgacagtttcatgataacaagatccaatattcgacccgagtgagtgacgactgccagacccacatagaaagaggttgcactcgccggattgagacctgagcagtgatgatgatttcacttgaagcaaatgaaaagtggccaaaaaccaagcagataagtctgaacatattttctaggcggaaaggcacctaagtatactgtcagatagggtacgtatattgcgtgtagcaaccacgcggccaagctgacgggctgaaggctaaggcgttcgaagtggagactaacgtccagtttaaaagtgcgggcttttcgcttcgactcggagttcgattcgatttgctcgatcctttcgatttctgatcttcaaccctccgcttgctggacaatgcggactctagcacgagcggctatagccattgcgctaattctaaccctgttttgggtcaaatcccacctcgaatccatcctgcaatggcgaaatgatgaatataattccgatctttatgtcctaaatggcgatgcgtatatcgagctggtctcggcccatactgcgacgcccgcgacgccatcacatacccaaacccggaggaaatggtcccccacggcccgaccaactcctcgtctaatgatagccaatcctgaaccggagcgcatccccgtcgatgtccccggtgctgaatgggcgggggagctatggttcagatctgaagaggaacccgaattctatgattcaaacggattcgacgatgcccaactactcgctccagtagagcataatgatgtcatggcaccttcgtctactgccccttctcgtccaaaggtcactccgaaatcggatcgcatcattattctggggaagatgtcatacgaagacactgattggctcgaggatcagctgccagagtatgcccccatagaccaatcactagtcgatcacaaccgtgccaattctaactgaattctagatggcaacacgcagtttacctcgttgatgaccccgaagcatccctgcaagtcgagcaaaacaaaggcaaagaaagtagtgcctacctgcaatacattttagacaactacgacaaattgcccgagtacatggtcttcctccacgctcatcaatatagcggccacgtcgaattttgggagcaggacaatgtgttgaccgtccaaagactgcaactcgactacctccgacgagttggatatctcaatctacgctgtgactggagtcccgggtgtcccgacgaggtccagccatttcgacaaacggctggtcgcacgaccgagcttgcctttgcgggtgcttggatccgtatctttaacaacaccgatgtgcctgagatagttgctacgccctgctgtgctcagtttgctgtgaccagggagcaagttctccaacgcccacggaccgcctatgagtcgtatcataattggcttatgacaaccgagttggacgacgagacgagtggtcgtgtctttgagtacatctggcacattattttcgggcaggatcccgtgttgtaagttgtagcccacaaaaaaagtccagggaattgatgttaacccgactgtgaacagttgtccggaaaaggctcagtgttacaaggatgtatatgccatggattatgaagagtcggctatgaatttctttgatgatggcatctggggcaattggtacgatgaagcacctatggacgaaatacctatggatgaaatacctatacacccaacgcctgtgaaggaaacacctgtacatgcgacacctacacatacaacacctgtgaataggatatgattgtatttatctaacggatggagagcttctgggatgtatcaatacctggacttgcgctaaagttcaatctgactgctttttagttctgttcctgtatattatttaccttttctgcttattctagccagtcattgacatatcctccccaagtgtactcgatcatagctatactttctctcactcgggtcttttccaaaaactcgaaactgtcaattgcttatactatggactatatcaatactggacataaatcatcgatatcatctgaaaattcaaaggaaaacattggacatattcataaaccatcgagtataccttcactgacttatctctgaccgagctccaaatccgttgactcacagccaagcaaaagccatcagccccatgaatcctaacatggatgtagcaccgggagccgaaatactagctgcagcatcaggagtaggagtaggggaggatgcagagcctgatgaggcaccggcggagtcagaagatccggaagagacagatgaagtagagtcctggctgcctccgctggtgctagaagagtcagttatggttgccgtgcttgaagtagcagtgctagtagattctgtgctggtagatgtgccaatcaaagtagtggcagcagcagagtaggtagtcgtagtaagcgagcaagagcggacaaggtcaagggcctctgattaatgcattagatttattttgtatcttattagtgtattcacattatacacaccgttatcgtcgtcattatcatcgtcgtcgtcatcatcattgtcgtcgtcgtgctgagttatgttatggttgcgcctgtcggtttgatactgggtgatgcaagcggagcagagcggaatctcggttttggcagcatcccaatcacagatgcattggatctcagctgaatctcgttcgtatttggcatcacaactcttggcaattccgacgacagagctgcaggcaggccagcagcggttggggacatcgtcacggtccaacttggatgcaattgcaatgctagcaagtaagagaccgcaaatagggaggagctgctgagtatgcatgattgttgaagttgatgattgtataataaaaaggaatttaattgtgtctttgttcttgaccgaaagcaatggcgaggattcaagacatatttatattgttgaaggttgatataactcttgttcgctaagcccactccaagcaactgggtaatttattttcgctctacatgtagaagatattattgtcggcattctccgcacgcatggtcagagttctgaaatagaaaacagacctccaaggtgtgtccacccttgtatcgaccagcggagtgccgccaatgttgattgtgtaaaagtagctgcctggtttatgccatcagccaagactgcgccaagagcctgaatggaaattccgacgagatagtactaataatatcgtgcatttgggttctgcgttttgtatatttttctatcaatatgcaggcaccgtggctatgctctatccctgactgagctggcccattctgaaggtttacaatctttcacttactccatacttcatacacctctccatttgccaaggaagggtcttattccaccccggagatcctatacggacaagcccacctgggcagtgtctaagccacgttgtggggctaatcggtgcataccattcaaattctgcaaccttgaccataggttaatcgacatgctttgttgtagctgtgcggagtactctatatcaaactttgagttcgagaaatcaagtttaaacctatatcaagtggaagaagctgcccatgtgggttgccgatagccaccattctgctatatatagatagccctgaagtatacaagcgacgataggtgctatatgaatggttaatctccaggcttcaggattcttcaaaagttcttaaattaccgcttgtcagtctatcgacaccattcgatatgatcttggcggcatacccttgacgtcgctcgaagtagcttggtaaacagctagtccagactaaccgactattgataattttgccgaatttgaggagatctagtgggcttattcgagtcgccatcaataacactcacgaaccgacgagatatgaccggcaacgtgtacgagttggccaggacagggctcagtagaactcgcatatttggtcgctatggcctcaatcaccgcgttctggagatcacccttgtcctctaatattttgaatggcagctctgtcctgacccgatcggtcatggaatatacagcagcctgtccgagacctgcagcactcaatgcaaccatagcagcccctgcaacttctttcagtctccgaataaaattgacataatgctgctgccgtggcgatccttcttcggtagctgtggcgttgaggtgcctgaaagcacccttcacacgctttgcttccgtagctttgaaaccccccctttcccccgcaagctctgacacgcccaggagcttacgaacagcctcattcactgtcagtgactttgggcgatttgttacatgctgaaatgatcgggccatcttgtttgatagtaaaacagtgggaggtcctaccgaaattcaggtaagatcgatgggaaagttgcgatgtgatgggctatcggcggaaatcgatcggaatcaatggaaagacgaattgtaatcacgtggtatatcacatggccgcaactatcatgcggtactacgttggaaagactgtgaagagtctgcttggagtgggaagagagctagaatatcctaagaaacgtggctcactacctagccttaaatgtgaggcgagatagtctcagcgtagcatgtgcaaattgaccgagtgaatttctttgacttggacagcgaagcacaatcgactgttacctcacctgcatattgggagcattcggtgtcagttggctatcaagtattctatggcgtaactgggatatcttcattggaccagcaaatcaactggcgttctgaacttgagaagacttgggaagaattgataattggcttcgaagacgcacatatgttgcagccacatagttctttcaatgctcctattggaactatcaatcttcctggctatactagggtcgttctaagaacttgtgcagaaacgggtgttgcgttgtgtctcgcaaccacggaaatcaaattctgatgctatatatactaagtattaccatcgtatataagaagaaagagataaaaaatgttaggaattgacaagaaatatatgtggtttgcaggaataactagagaaatcggtaaaaatgggtctatatcggcagtttctgaagtattcccgtgactttgatccagagtccataatcaacttgtgctcagccgcgattccgatattgtcgttgctatgaggtgccagattgactaagaagaaagagcacattcaactaaataactaagatagagaaagaatgaagaagtacattgcaaagtagaagcagttgatatagttgagcaaacttcgaacgtctggcttagctatctaacaaacaatctacttaactagttatgtgaatgcaaactagtaagcgagcaagcaagcaaacttgaatgcctttagggttgccgtgcccaggtgaaacctaaccatgttgttagtaagaaagcgttgaggtggacccccgcaatcataacatcatttccaagttaaacgtacttctgctctcatttctaattcaaccaaagctacccaattaagtaccccttctcaattcccccatcgacatagatgactcgagcagtcgggaagatgtgggaaaaatactgcttgcgtccaactcggggcactatctccaccaccatcccagttttcatctacggcacagcctggaagaaagaccgcagtgctgatctggtttatggtgcaattaaagccggttttcgggctgtggacacagcggcccaaccccgccattaccaagagcatctcgtgggggatggcatccgcagagcaattgctgatgggatcgtcggccgagcagacttatacgtgagtggacagctgcgatttttaacttagatatattcaggattgatagctaaccatgattaggtgcaaaccaaatatagtcctgtctcggcacaagacctggccaatatgccatatgatccatcagcgacggtgactgatcaggtccatgcatctatcaaatcttcattgcataatcttcgctcaaatgttgaccccgactccgtggatgatgcctacattgacaccgtgatcattcattcgccactgtcaactttagcccagaccctggaggcctggcacgcccttgagacctatgttccccatcgcatccggaatttaggaatctccaattgtacattgcctatactccgagaattatgtacgtcgtcgcagacaactgtgaagccatcagtggtacagaacagattctacgaggatactctgtttgatgtccccctgcgcgcgttctgccgcgagaatcaggtcatctaccaaagcttttggactttgacagcaaatccggacctcgttcgctctgagccagtgcagaaacttgctcgccatgttaagataactccggctgctgctttttatactctggttatgggcttgaaggatgtggcggtgctgaatgggaccaagaatgagtcgcgcatgaaggaagacttgtctgctcctaaacaggtcgaggatttcacacggaagcaacctgagttatggcaacagattttgacggaattccggggtttgataggggaatctagttgcatataaaaacttgagcaagccgtgtcaaggcttctgcggggaacagttagtgctcaatggtagtgcttactgcaaaaatcaaataatcgagtagatgtaagtatgaaatggcatcttgaaattgcaattgtgaactctaggctcacgatcctgagatagcgaccagttcatctgtactgatacctgacagacacgcgcgatcacatggcaaaatgaggtacttgtaagtactcgtcaccacttatcttgctgactcagtcaacgccatccgtggccggaccggggcaacttggatttgccgccgagtggcatgagggttcatatttatcttgttgacaatatagctgcattcgtttgattttctcttggtcttcctaccttgtgcctctagagctaaatacttgccatatcaactcattcaccgcccagtgggcgctttctgctgcagcctcccgccttattctggatgttggacaattcacgcgcccattgagcatcatctgcctagtattgatcactgctggtccttgatttgccgcctgctatcgattcctgtgatccttcgtttacttcagtgtcgatacgacaaatttcgcgctctgctcagtgttatccactttttccacctctcgcttctgtggtcaaagccgtcgactcaaattagaaccgacttggatgaaaaacttcctgcatactgagttcgcttccggttcctttgtctcctaggcaaatttcctgcggccaactcagtctcctattcagagactaaagaaaatcgagatacaattctatatcgaaccccaccgcgataagagtcattacgccagcttcttcacgatgagctcgcaaggaatgacccgcaagagaccagcaccgggaacagtaccgcccgtccatcctcagatgaaccctgtaccgaactttccgaccactgcgaaccccgggtctcagctctcgaacgatcaattcttacaatggggccagaacccccccgtcaatgccatcaatacctccgccttctctgatcccacctacaaccccgtggccttttcctcaccgcaggatgtctctgcacctgctgcgacagcatccaatcaactcgcccgccgacaagcgaaccaggtggtcagccgaaatcgtggctacgagcaacctcctgcttcatatgtggaaaatggaggcaacaatggaaatggggagagtggcgcatggggggagtctctagaggagctctatcggcgagccttaactgcgaagagagattcacaggcaaaacgaaagcaaatcccgccatttgtacaaaaattgagcaggtatgatccgacctatcgctttgtgatcaattatagggctaacgaatgatcgcagtttcctagatgaatctaagaatacggaactgattcgatggtctgatgatggcaattccttcgtcgtcctagacgaagatgaatttgcgagaacattgattcccgagctcttcaaacacaataactacgcctcatttgtccgacagctgaacatgtacggctttcacaagaaggtcggactttccgataattcaatgcgcgccagcgagcggaaaaacaagagtcccagcgaatacgccaacccctatttcaaacgaggccaccctgatttgctatggctcatccagaagccaaagaacgctgggggtggcggacatgcgagcaaacctagcaagggcggcacgcgcgtgaaaacggaggatattgaagataacgagatggacgattatgtcgaagagggtgcaccggcccctcgcgatacccgtgctccccgaccacagcaattgtcattagccacagacagctcagtacccaatgatcaactttctggagtgtatcgcgaacttcaggcgattcgtcaacagcagtcaatcatctcaactacaatcaccaggctgcggaaagaacacgagcaactctatgcgcaggcagccaacttccaagagcaacacactcgccatgagaactccatcaatgccattttaacattccttgcaaccgtgtataaccgcagtttgcagggggagggcgggccacaaaatctcgccaattcttttgcgggagccatctcgcaggaccaaggaaacatcgtggatgttgatgatgactaccttaacaatgctctaggatcaatggctagcccgagtgcccagagaacaatgaagaagccgccgctacttttgaaggctccgcccgcagcgcacgcgtataataatcgaccctcaacaatttcaccgtcaggcagtggctcctatgacacgcggtctcgtggtcatgctcggcaacccagcgccaaccagcacggccatgtggaggaggtgtttgaccacagcccacgtactgcaaacgtttctccgggacagccgacagaccagaattcccctcaacgggacattatgtctgtaatccaaaattccaatgcacgcaatgggctctcaacaaacttctccgagttccccaatgtgctctcctccctggaaaaccacggtggtaatgttcccctcacggcaaatcaacgcgccgatatgcttcgactcatggccaacgaaacaaattcatcagaacccaacgctggcgtatcgcccaacaacgcgcttatctcgccgaatccaccccttatgccgcacaactactcgggcaggctagccagcacacgacaagaaatcgacaacctagtcaagatgcaagctgagcaggatcgttctgtccagaacttgactagtcttctccagccgctgagcccgaatggcaccatccccggtatcgatagtgagggcaatgtacctcctccgccgctcgaccttgaccaaatcttcaacaacgactatttcaccgacattggagacacagggtccgatatgaagaaacaggagaatccaatggaccatttgggggcaggccagaatacacacgatcctatggggaccacccaaggcgatgataccaacgacctgttcgatttcgatcacatccctaccgagcctgatctttttgaaacccctcataatgcgcagggtgatcccacctacaactatggttttgacggtgttggatacgatgaatctgggcgtgtgatcgagcagctgacggatagcgaaaccaccagccccacagccacgggaaattcaagcgaagctgtaaatgatggtggtagtgcgtcgaaacggcgcagaaaggcgtgattctgccgatagcatgaggaagatcagaacggagcagattcacaaccacggtgtggatgtggacaaaactttcggcgattaggcgtttttcttgttgatatgaggtttcacatacctggagatgtgactaggctgtaaaaacctatgatgatccatgaatgaaccaattcctggaattttaatgagatacctttgctttaccttcttcttccttaatgagtttaatgtacataggtagaggtctttccagaacttttcggaaccctcgctcctccctttttttctcccagttgcttcatcatcttatgagtccatcgagcactgactttctacaaaacatgtgccatattgtgccaacggttgatcacgagatctggtttgcctttccacgcccttcgaagctccaatctatcctcaccttcactcctagctcattagcaaaaacacgaaccaagccagggttctgctggaaccaacgcctagcctgcactgcatcaatgccaggttgcaccagcttctcggccagaggccccgtttcaatcccgccgacagccgttatccatagcttgtcgcccacggctttcttgacctccttggccaaatgcacctggtaggcagggcccggtttgatagcaatcgcgaacttgtcttgggatggatgccgcctgagctgatattcaccaagtcaatgccacattcggctaagagtgggacgagttgaaccgattgaggctgtccagctctcgggaaagtctttcttcaattcatcgttactgaattcgaaccaatcagtcgcactaattctgatcatatagaggcattgcttccgggatgctagcgcaaattgcctccaaaacttctagcagtagtccgattctgttaacgcttccattaaattagcggagcactggttcagtagtgttatgcactgatcacaccagaggcgtgaccacaccagaggcgttgttgtaaaacgtaagcctgtggcatcaccgtccctctattattctcctcccaaatcttcaactcgaatctctgacttcaaccctctaactccctcgctaactaactctgtaattgacttgcaaatgcctccgcgtcgccctcgaccaaagctctctctgtgggtccgttttcgaagatggcttcgctactggagctcacctctccggctacgcggtagtctcattcgactcaaacaccaacacaaataccccatactgacgctccttcgcttgttcattccctatccgtcctggtacttcccgatcccggaacgattttctcttcgcgaattgattgaagacgaagaaaatgggacggggataatctcttcccattttggcgccatacataatcttcgctgtattccgatctggcgaatgcgggacacgccattacggtctatttaccggctctacgagctccatctcgcggatcggtatgagctgatgggctatgaaaccgagtatttctttttccagagaaactggaagcttggagatataccagacccgagagatcctgatccgcttcgttatgcgatggtcgcttcgatcacggaaaaactacacgaagcagtcaactggaggttgagcctcggtctgcggagaaatcgggagcacgtctgtcgggaggaggacggagacccatggcctcctttcatccctgaagaactgccagactggacgaaaagtgtgccgcctatggataaagatctattgagacgctcagtaccatcagagtcactggatgccgaggggaatctggtgctcgagaagaatggcaaaggccctaattttgcacggcgcaatatcatcaccaacacaggttggttctatacaatctaagagcacacttgaacagttgtcatatcaatcatcaacttcatgggtcgaattcaattgaatcagcgagcgctagcatccgtgacatcctctttgaagatatcctcgtcatattcacgacgttgggcgtcagccacttgatgcattgtcctatagtcgggaatcacgtcgaacccgttcatattcattgtctggatggtctccaaatccagcgggccattatttcgggttctcggttgcttcaaaagagcaactgcatccgtcagatctagatccgcctttcggtctcgcttcgcagcatatatcctcctcaatttgcgctccagggcccattcaatcggagcggccaaaatttcgaggttttctcctttgaacagcgttatgtcctgtttctcggctagttcaaacaaggtctgtcgagtcttcttcgttacgaagatagctacggcttcgttgatccagtcagtggggaagtgtagtttctctgccacagacatgacagcctcatggaaagcattctgtatctccttgtcatcggcaaactcgggatcgatcagataatcgacatcgcctgtgctctcgcgattcttgagataggacaccgcaaggaacccacccgcactgatcagtcggatgggcgcgaatgcaatgagccagtcatcgcgacccattgcactatcgagtgctagaaggcctttttcttttcgtaaagttggcgccaaagacagcctctgtatagtactgtttttgggtgtatcttaccctcttcaaaattcttcgaatcgagatatttctttcgatcagtcatgatggacactgattgaaaaaacgagaagaaatatgagtttagccgatgagatcgaaaaatggacaggagatgagatttatatggcagaagccttccaaggttagaaccccatacatcgtcattatggtgtgttgctttcaatcatcattggacacatgggatacaggatgcaacgaagctgcgaggcgaacagaataaccaatcccaggagtccctggagatgcgcgtgtcttgaaactgcctttttgtaacgttggaagacgccggcacttacctgcagggcatgtagcgtctggctaataatatccgacaagtaagattctagtacatatgtgggatcaggatattgataggctaatatggaaagacttgatattgagagaaaaagatcattcagcgccccttatcccattccaaatcaccgactcgctctcgtttacgctcgcgctctctgtcgcgttggaatccccgctttcgcccaaccacttccttctcgcgctcgcgaggatcaatcaccataagtgaatctgcctcacctccatgctcgcgcttccagttcaagtctttgcctagggtatctttcccaaaccggagttcatgcgagagccaaccgccgtcttgctgttcggggtcgtccgcctctgcctcggggtcatcccatgcctggcaggattggcagtttgcaatgaagtgcaggtcgcagagttgggcctcttcgtcttcttcgtctttcttttgattttcggtgtctttgtcgatgtgacttttgctatgtgatggtgtggcagttggttcgggtttggctccttcgagcttggctttgaaggcgttaaagagctgcaatgcttctcgttcagcggcgctactaggtcctgtcccgttacgactggaaccatttgcggttcctggaggtggccgtttccgtcctcggatggaggtctcagggatcatggcttcgagtgcagacttctttcggcctgtgtccttaggaaccaggtcaacgtcgcggcgcattgacgccatcagagcggcaatctgagcgtttgtccgcgacagcttggactcctttgcgggtggggcgtccggggtcggagaccgagtaggcgactcagggtcaggcagggggagttgtgtttctggatctggtgtcgttgggcgccttttacgctcggtagatggcgatctatctagagatggcgaccggggccgtttgcgcggctgtgatggagcatctgctcggggtttggggcttgatgcgtcgggctttgcacctggcgcatctacgaccaaattggtgttgaatttcggcttcgctgggcgcatgggtatttcttcgtctccatcgtctccaaagctcagaagcgtcttcccgcctttgggtcccttcttctttttcttgggtgcacctttatccgccttcccggcagttgagactgtctttctgtcctttaatttgccctccaaaggccccagttctccaacctcgcaggatgtcaccttaatcggataaacaggacgctcggtgcccgcaatgcgctcggcgtctgcaatcttcaacacattgtagatactgtccccttccagtctcccaaaaattgtacattgcccattcatctcacgctccgtgtttgctagcgtgatgaaaaattgactgccgtatgtcccgtcctcgctcttggccattcctagcaagccacgtcggttgaaacgtaaccgactgtgtagctcatcgcgtagaacgacgcgctcatgcgggtcccgagcttcaggatcaaactcgaattccgggtattcatagatagaagttccgccggagccagtgccggtgggatcaccgccctggatcacaaaatcgggggccacccggtgaaagattgtgccggcatagtagttgtccttgcagtgctgaaggaagtttttgcaggtgagaggggcctggtttgcgaagagcgcgagctggatggggccaaccgttgtgttgagcgtcgcagacgcagtgggattgggctcgctggcgtattgggtggacatgatgggcaagtaagctaccggtttacggcgcgtgccacaagtgaggtagcctgaggatttggagtgtattcggggatagggacaccctcttatagtgttgcgattcaatgtgttggtttctccgatcaaaagctcggagggaacgtcatggcacgtgacgttgatctagcccttatttacttggtgtctaaggacagttttaggaacataaaactaactgaacaaggaatgagcatcatttcttttgacttcagcactacgtgacacatttcgcacatttcctgcagtatcggaatgagaccccaaagcacctatgcctggctaggcagcatgggatgggagtttgagcgttgggcatggaattttgtcgcatttgggaatgatcaatagcagagggggccaagacattttcgggtgggtattttgatttgctggtgggcatgtcgagcgcatgctgaggattatcaggattgaatgtttggcagtgggtgctgtaggtggttgaatgatccgaggaagatccactcccggctcaccgagtcgtcagtccgagatcttgctttgtgaggagatatttgtcgttggcaaatgtcttttttcagttgggcagtcgaagcttgcgtcagccattgagaggctaatcttggaaggacatgtcggctagatgggatccaagaaaatggtggagacttgggatcatcattaccggagtgttgataaagatcgagatgaacggccgtaggtaagtcgcatggggagtggtccagtattgtcgcgtagggtaagattactgataatcgtggtgatttatcgcgtgggatattgcttgatggaacccaacggaagctcaagcttcagttccagcaagtcagattcacaccggccgtcccctccgcccggggttgtggaacaatcatctgcttctgcgtctggtcctgttcctggtgctgctcttgatccgaagccctagcatgaaggcctaacttgaaccgcagacggcgcaaagtgcgttcggagatagcgtaaccttctttctgcaacatgttgagcatggctttatcggtcagcctatcctgtataaaaagcatcttaatgcgcgcatgcaaagcctcgtcgcctgtcgtcgtctggtgtcgcttgcggatgccccatttgcgaaggcgggactggatggttcgttccttgacttggatattgtgacaactttcgagggtacggctgatagagtcgctactgatgccatggtggtacagagtaatgatatcatcccggtagggttctaaattgatttgttggcgaggcattctggggttaagaagagaagagaaatgcgaagagaagagagttggggagtttcgagttgttgacccaaggcggtgaatctgcggaatagtcacttgtcttgatctggatatcgtgatgtttttcgatgttttcgaggtgagacagatgtgattgaaattactattatgctcattggcttggccagggacctgaaactgcaaatcgaaagaaattggatcagatacgcttcacggaacatcccgatacgattacatactactctaggctctcagatgtcatggattgtatagtgcgaaaaacagattcaacttattattgcatttcatagattcattacgcattgcaatcttaccaagcaagtcacaatctcgggattcacccattgatctgatccattcggagaaaccaacaattcaaacctttttacccgcctccatcacagacgagctcatgacttcagggctaggactagccttgttccgctttgcaatgcggaagccaccaagtaggaagaagatagcctgcagaccaagaatcactgcgagggtaaccatggcaccaatgacgcccgccacagcgagtgacattcccgagccaccagtgctagaggtactagcagagccggagtcgctgctggtgctgtccgaactggcgcacttgccgtcggtgttgccacacatggtacaccactcgtcatcggaagtaacggcgatcgccttggtcttcgaggcaaagtcgtcccaggaaagaagctcgcttgattgaccgtacaatgggtatacggtaggctcagaggaaccggttatggtaccattgtggaacatgaagcgcacgctcaggtcggacttgtcagttgggaagtcggtgccactggcattggtcaccagctcgaagaccattgacgaggcgtagtccgggattccggtgaagttgacggatgcagcaggcatctgcaaaagaccgaaaagggagaagatggtgccataggagccgaatccgatgctcagcttggacgtgcccttggtagtgatggtttcgttaagtccggccaggatttcgcctgccagaacggcgccgtcgatggcgcgcactttatcggaggagttataagccaggttgaattcatggcttccagctagagcaatgagctgatgatatacctcgtcggtcaggtctgacttgtgagggaattgactggtagagttatggatgttgccaacgttcaagtagtcgaagatggtataggcgttcttgaatgtcatatcagacgaggcaaatgtactgtccagcataggcgaaagcgattggtagaactccttggttgaggatagcagcgaggtgtagatttcggagaaaaagtagttgttgctgctcacggtggccttctggcatccactggagccttgcaaccaggtggaatcctcggcgttcttgcttgtagtggcaggtatcagctgaatgagctggtagccgtttaatggtgcctcgaccgaggttccattggccagggtctgggaagccacttttcccacggggggatagacgccctgtaggaagccagtggcagagttctgcagcacagtatccgagggagcagaggcactgatctgctttgggttgaccacatcggcactaatgccctcgatctgcttggaagagttcgacaagatgtatcgctcgttgtaaaaagaaccggtctcaaagacctcccgatagcccaggtcggtcaattgagtactacccaagacctttggcgtgcgatctccatggcgggcgaaaatatacgcacccaatacacgctcagcatcaacaacgggggacaaagatgcagccagtaaaaggccagactggatagagtaccgcatcgtgaaatattgggagtaaacaagaaattaagaagcagcaaaatctgcgggggtttaccttctttatctagtcgtggatgtcaatgtcaagctattgcgggcaagaccccttgactcttccgatttttcgctttttttttcgcttcgagacccttgcgattgtaagcttggaagcggggaaagaagataagtccctgcagtgtctgagaatagtctagtggacgaatctcaccaagtcattggttaatacggagtctgaagggagtcaacaaataatcattagctaattcttgggaaacattgcatctccgcggtaccgcggagctatgatagcgtatccatacatagatagagaagaattgacctataacagataataaaaccgttgactgcttactaggtattaaatatgattctcagatcgaatttgcggatattcggatattcttgttcctgttcgcgctccagactccatccagtacccagattgtacatttatatcgtgacataaaattcagagaaggttcagatcgtatcgctggtccttatgccgtcgtgacacccttggcacccattaattcacatccatttcgaactacaccgacgagccctccagtctgaatggcttcagaaccaccccctgcaagtcgccattcaatctcggccagtccttcaagccacgtgatacgtgtttgggcgggaacttcgagctgctggagttgatctgctagcgcggaaaggatgtcggccaaagccagacccttggtggactttagggtttgcacggtgttcagacaggaagtgacatcgctagtggagaggatggtagacatgatttcttggatatcggacgggtgcggcgcggcaatgcagtcataaatcgtcgcattggtgacaatttcgggctccggacgaggggctttcggggcgtctctcatcggcagcgggatacctaaaagataacattagacaattaggatgaaggtgaccaaggagagaaaggacatgagcttactgctggcaaagcatgcctgaagcacgtttagggctcgtcgcatatcacctttgctcagggtcactagactgtcgaccgcatcgggctgtatcctgacaccctcgttctcaatcactttgtcgaccaaactccgaatatcggcttccttcagtggactgaaccggaatcgagtacaccgcgacaggagtgccggggacagcttatgtgtgtagttggcaatgacgcagaatcgggtattggccgtgtagcgctccataatacggcggagagccatttgtgcggtcgacgtcatcgcatcggcttcgtccagaatgataagcttaaaacccgccagaggggagccgggagtgccttggggggccatggtgaagatctgtttggtgcctgttcgtattcacggtaagcttgtagttcataactcgagactcctagagcacgaacttgcaaaggtcttgatttgttctcggacaacttcaataccacgatcatcacttgcatttagctccaaaaccatctgtcgcatgttcttggtgccgtagattcgccgcgccagggccaggatggtagaggtctttccggttcctggtggtccatagaggaggagatgaggcaatcgctggacgagaatgttaatcagaggctatcgtacatccggcatcgtaggcattcgttacgtttgtctccacgaaccgattgatagtcgcgaggatgtcttgatggccagagacatcatccaggctgcttggtcggtatttctcgaccctgggaagggtattagtgatataacacaatcgaagcaattcctaaaactcaccatggcaaattatcttgagcttcgactggcagatcagcgacattcctcttttttccactggcgttgtcggagctaaattgcacgtccttgggcgcatccacgtccatttcatcctcgtaatccgacatagtgaatgtctctctcttgggtagagataaatgatcaatatcaacaggcctatcaagagcaggtaaaccgtgaaaagtgcccaaaaggtttgacgcgtggagcgcgtaaagaggctcggggcggaaaatcatggagcttgggaactccacagatgacatccctctgcctaacctccaacgggtcaacttgtcccctccgcggtctctttgattgaacctcctacgttttaatcatttgacgctttcaaaatgcctgtatgttccctacctttgtatttgtccaaagcctgttgttaaccctcaatgcaggcataccactccatcttcctggaagaccgcgatgtccccgtgataggtaggagactcctatcaagtctacacagagttcccgagctacaaatcgacatttcaaggaccaaattgaccatcgaatttctcctgactaggaaactttcccattcttcccctccgaacccgtactcgcggccccgcatacacattgcccccgcttcctaacaccgacgacctcgatgtgtcgcccgaaagtgaatcatatgattgtgtcgatgagatcctatcgctcttccgtgccaatgtcttgttccgcaacttcgagatcaacggccccgcagaccgcatgctcatttacgggactctgtttattagcgactgcctcggaaaggtcaagccaactatgactgcccgtgaggcggagaaggtaaattttgatgctatatatcaaaagcctgatataacagaatgatcattgacaatcgtattcctaggccctgaccaacgccgccctcgacagctttgctattcccggcgatgtgtcgttcccccttaaccaggcctttgaacccccgcgtgaccgccaggatgccgagacgcttcgccagtgagattcttgatgctatacattgcaactcaatatcagctaaccggttcttgcttccaggtttatctcgcaggtgcgacaggagatcgccatccgcctacacgctagattataccccggtggtgtcgggccatcaaaggtaagaggaaggaaagaatagactcctcgatatctaccaaatactgaccaactctagttctggctgagtttcacgaagagaaagttcatggggaagagtctctagacgacgagcgttgctgtatattgtttgatgaaattcagcgcatgaatgaatttgatacttgattcaaaatcacaccaagcgctttgcgtaacttccagaggcttggatgggtctacttgcatatctgggagtcaaaattgccctcggactagcccttactcgatgtccaaagaaagggtagcagctagagcaagtcggatcacacgaaagatcagaagtaagttgttgtaattgtacattaaaatgctattggaggctattttgagggcgttcattcgtgaaacctaggacgtcatctccacatctcgatcactgatcggggtagatgtcgtttccacctttcgtctcttacgaacattcccagcagcctggatattctgggtggtagggaacacgcgaacgccatggaagagatatccctctgcgccaccacgtccagtcatgaggggatgggtccgaccgggcagtacttgccaagggcgcacacgcgacgtttgcaaggtaggtggaagaagaatcgtcggatcaaccacaaattcttcatggagtgaggataaatcaacggcctctccttcgggactctgcgactccaattctcgctttttgttgataaatgcggtcctccgagcagtggagtacatgtctgtcaattcaaccagagactcgactgtcggagaatatacgacaacaggggcagaccctgcaaggagcgggaccatcgtcttaaggacgcttgctggctctagcaaggtggagacgatcagaccgtcaaagttaccggctcggccctcgtccaccactgctttaactcgcccccatcggttgcgcttgtggtaatacgcagtgcgcttgctttgtttaagctccgccaattcctctgcaggtatgatgggtggttcgttggcgtagagcggatcggaattggggtcagccaactgcatccaggaaattgatttgaggtgggtgtggagtgggtgggattcgtcagggttgttggtgtcatagccaaagaatttcaagagtgacaagttcggttgtgagtatgggtggataacggtaatggtgttggtagtagcggacattggctggggacgtatgcgccggggctttgggggttcatcggtatgttgagattctgcagcattgtgggctggaggatcttgctcctcggttgggtcttcgtcggcatcgtgaggatatagaattcccatgcgctcagccatcgcggcaacgacaagtccgccagtctcatcgacgatagcataacgtccatgcggcttcatcccctcacccacctcaacgtttccgctgtgatgtacattaccccagcacccgatgagaccgatgtgttcgtcccgtagctccattgccttttgcgcatcccgttcttcgatcagataattagcgagaaggccgacgtccagtgggaggacggtaaaccgcttcagatacttcttgcgtttccgcagcgtgtatttggcaagagagaatgcggtcttctggtctattgcgctgtgcgattccaagagctttgcgacaatgtctttccccgcgccaccggcctctcgcttcaattcttcaatttcctgtagagtcaatttttgggaagagttttcgtcattgatttgacgatttgttcgcatcggtattccattttcgccagtatccacgtcgtccccctccccatctccctctccgtccgcgaggagggtctccgcatgcaactcggttgctgacacgacacgtagttggtggccagcatcatcgcacgcatcgagaatttcaaaggtgaaatagaatgggcgtccaataatctgattggcggtaaagttaccaaatcgacccaaattgacgactctggtccaatgttagttcttgcgatggaatctttccccgcatagtgcagaaagtacttacgtatcggggataatctggatgagtcttaactgatccgactggagccggatagccacaaactggcccgggcgaatataggaatgcatgatggcgatggaacagctgtgcctcgagctcttccacaaaattgttctggggacttttatggccgatagaatgacagccaatcagaggacgagaatactccagccgggtggatagatagtccgggacattcatgcctgaaacgtatgcctgatatttatgccttaattactggcttcataccaatttcgtcattaatttccaacataccggcccataccgtactagcaccgccactccacccgttgcccctcttgcatgtgaataatacggtaaatacgcatactggcgtagcttccccaaagtcaaccagcgatcgctggtggatctgcggaatcccggtgccttgcgagaagagagacctctgagatcatcatccacctccgtcattgccttgttcaacatagctttctcttcatttagggcatggtatttccgagcacacgctaaaggctaggctgttgcccatcactcgcgtatctgcgtagacgggcacttcagcccctgccgtcccagcgcaaggcgtttttcctatactaatggcttattgttattattctgagcttacgtcctgaatcaactctcaaatcgaactacagactctttctgagtgtgttctgagtgtgtgtcgatcgacgttgagtgctttattagccttcccgttcctagaactatacgcgaactcaacccttccctctccgcttcccacaaggtcaacggaggtcttcatgggcctgcgaaaacagcccccaccgcgtctggagaacattagcaagtcaaatgttcgatcggacgcacgctcatccaagtcacccaactctgcttccttccatcgcccgattcgtttaaaccgatttccttctggggaccctatctactctcccgacctcaatacttcacctgcgtttgacctgatgccacttgaggaagcacagcggtcgcctgtggggtctcccaccagccaacccccgagctcatggccagacaataacagaagaccggaagacggccgctccggtcagtataatcagtatgagggagcatacaacgaacctgcaaataccaacggacactgggttcccccgacattgacggcaggtcaacaactaggagcggccgagaatgtgtggcggtcaacgactgatggcggtcgtgcttcgactggagagctaccggtacagctgcagtcgaataacccattcttgaagcctaggccggcagagcatactcaagatctcttggatcgcaatgagtggggacgtgattcacatgcgacttcaaacagtgacgcattgagccaatgtatggcattagttccttctgaaagttccctcagaatgatatttgttgctaacgacttgtagccgaagggtatattccgatgactgcgcggctctctcttttagatgagcccgaacaagaatccccatggaccgaggctcctcgtcctcaatccaattcccagcaacgccctgtattaggcggtcaccacctcgatgataactcaccgtgggactctcaacagtccgccaaggttccggttccccagggtgtctacctacaaggagagcagtctaatccatatgccccagcggttgcggtgcagccgtctggcctttctgattgggaaacctatgccggccaacaatataagcctccatccaattcagggagacttggatcggatgctggaatcaatactccatctgttgctctttctaatcgaacctctgctacctctcatgaactaattgattttggtgaattgagcgccactgggaattcggtgggcgagaccaggtctcctgctgcatctacggcgtactcagaacctgccgcgaacggagcaagatcattatcagaaaagcaagacctcgcagctcccgtgatacaacaactacaacaaccccaagcaagccctatactgtctcccgcagaagctgcacgacaaaaagagcaaagatcagaaacatatactattcgacacatccgatggaccgatcagagtggtcaactgctggagtccccgattttggtccaaaatcaaaacggaccttgtcctctgctagcccttataaatgcattagtgctacgagcgaaccctaacgctcacccaccaatcgttagagctctgtcaactcgcgagcaaatctctctaggtttgctaattgaggcgatgtttgaagagctgacaacatgcctgggccctgatgaggagttcccagacatcgaggccctcactcaattcctgacaatgctgcacacgggtatgaatgtcaatccacgtttgacaatggtgagtacatgcgatgtatctgtcaaatatcacttatactaacctaatgtcagaattctactgaaggatttggcactttcctcgaaaccagcgacctcggactgtatagcacgtttggtataccattgatccatggctggctagcctcatggtccagtcctacccatgctgcgatgtcacgcactgcccagtattacgaggatattcaaatgcttcccttccgcagacacgagtttgaggaacgggtggcgcggggcgaggcacttgaacctgcggaagagaatatcatggcggatatccaaaccatccagcgatttgtggaaattgagaatgcgacacaattgagcccatttggcctgacacagctctcaactaagcttacgcccggttctgtctccattcttttccgcaacgaccatttctcgacattgtataaacacccgcaatcccaccaactctacactttggttaccgatgctggctatgcgggccatgccgaggtggtttgggaatctctagtcgatgtgacaggattcaacacagaatattactcaggcgattttcgacctgtaggcgctggtccttcagctccatctggccctgatcccgcggtcctccaagcctctaatgagccagccactcattctccagaggcaaacgaaggatcgaaatcccctgagctgactcaagaacagagtgatgccgactatgcatacgcgctgtcacttcagttccaagaagaagagcgacgcgaaaatgctaggaatgagcaggctcgtgatcgtcgcacatctgcgccgagtaattcttccaatcggccattgccttcgcctcgcttgagcaatgtgcctaatcgaccattgccctcgcctcgtttgagcaatgtacccaatcgatcttcgagcattgccaatacgattggttctcggcctagtcctcagccacaacatggacccgaccctgaggacccaaatgcaccccctcctccatatgaacaagctgctgctagcgggccgcgttgttcgcctcctgacataaggccatatggccgtgccgcaggaaatcagtaccctggtaaccggaatccgcggaatcgaacctcgcagtcttctcaccgaccacgcccgcctgtacgtgcaggggatcataatatagaaacagaacggaacaaagaatgcatagtgatgtgaccaatgtaagatctggaaatgataagaggcgttgatacttgctttacgccaatgcactggatggatgaatatgatgcctacaaatgatatatactattgtagagaaagaacatgtctttgattgattcgattccagatgaaaccttaatttcttgctcctcgttatcctcattctccacggcgttatggaaattaacaaggaccttctccgtgcctctaacaggagcggggctaataagcatatatcaacaaagtgacatgtgagatagctacgtatgttcggacttgtcacggactacacctatgcccggaggttaagtaaattaaaggactcacgtgaggaagaggtttctcattggaggagtcattatccagatagccctagatcttcccccgggaaagactaaaaaagtgtgtataagctatgtattgcgatatatgccgaccatattgccctatagcctaagtcaaaggcgatttgggacgctcttatatcctgaatgatacaaccccggtccaccggcccgttgactaggatcagggcatacgtagtataaagaatgctgctatgataaaattggcctataatcatccttcacggtgctgatttccttgcgagccatcaggatctgtatatttcctctgacagtagctcttgcgatgcagattcttctttctagtgctctagccctcgttgggatggcccaggccactactgtttgcagtggaacatttagcacaatctcagctgccgagtttgtgtctaacctgcatcccggttggaatctgggaaataatcttgatgctgtccccgatgagggatcttggaataatatgccagttgtggcgtcgacagttgatactataaaggatgccggctttaggagtgtccgactgccagttacctgggcatatcatttcaccggaggctcacctaattggactgttgacccagcatggttacagcgagtctctgatgtggttgatatgattgtggctcgtggaatctacgctatcgttgatgtgcatcatggtatgatatatgatcttgtatcggagaagggcctttactgatataaaacagattcatgggtttgggctgatgctacccagtctggaaccaatcttactatgattgaagaaaaattctatagtctctggtatcaaattggaacgaagttggcctgaaaatccaacctagttgcctttgagcctatcaatgagcctccttgcaatactgcggtcgacgttaccgagtcgaacaaactgaacaacatctttctccaggctatcaatgatgctggtgggttcaactcgcaaagaattgttaatctagtcggaggtggtgaggatagcgtcaagactgcagactggtttgtagcaccctctggattttggaatccatatgctattcagttccactactacagtccctgtgggccatagatcagtttatacttcaggtataatgcgttgtgggttgaactggccgagtgggcttctagacgacttgatattcagcgcttggtaagagtatagacccagttttttttttttttttttttttttttttttttttttttttttttttttttttaaaagtttactgatttcaaacaggggaaagatcatttggggctcggggctctgacagtgacaagactactgtgcagtctgacttccagctgctgcgcaacgctttccctgatgtacctctccttttgggtgaatacgatgcttcacccaccaacaccgaacccgctgcccgatataagtaccttgacttcttgatcaagactgcagccagtctcgatatctcctgcgtgttgtggaataacggattggaccacttggatcgaaccgcaggagtctggcgtgactgtaactcactctcgatcatcacaaaatcaaccgagtctactgccaatagtttaccagatagtaccgaggacgcttctgcaaccacacattcataatcagcttatattttccatcagtatggaacagttgtgacagcacaaactcttccatttatcttcaacggtaacaccctctcgtcaatcagtgactccacttgctcggcattgtcgttgggaacagactattctgtttcgggtgcaaatataatattcacagcttcgtacttatccaagcatctttcatctacgacaacaccgggtattattgccactctaacgctgagattctcggggggcgattcgtcccctgctgtccaaattgttcaatggaaagccccaactctgtcgtccacatcggcggtggcttcgactgtctctggctctgccctatcaattccaatcacatggggcggactatcaaccgtcgctgcattaaaggccttgaccaagagtggaacatacctggtcgatgactggacggtatcactgagccctatccagcaagcgagagttgtaagccaagccctatttctctttgtgtaccatttactaatactactaatatatcgatctagacctacagcaaccagtataactgggatgactccaatgtaatcctcacttcatctgctattagctgtcatctctgctggccaatcgaccgtgttcaccttcgagtttttcccacgggataatggtgctgtgaatgccgtcaactttaccttgactgtttgataggatttatacctcgatcatgatagttgtactgaagaaatagttcaattatattataagtattatcaggctttgcttagcagcctaggtatcgaatatcagcatttatgtacaaaaaaaaggtaaaccatcgctgtcatcaagtcattaaattccatggcagatagctaaaatcaatacaagatttttaattcccgtaaaggaagatgagggtcatatttgtcccaaacgatcttgttcttctcattcaggtgtgcgccctcatccgtgatgctgattactggatctgtctccagaacctcatggttactgaaaccccacttatcgcgtgggatccacagagttggtggtggcgatgctacacatggctcgaaatatgctgtacgcatctcttcgggtgtgtaggaaaccccctcaacattgcggcgaatcttttgacgcaatgccgcataatctttgtatacgtttggatggaaccatttccagaaggccatagcgcgtgggcggcgctcttcgttgatcgctgccacttcgtcttctttctcttggagcatttcctcttctgcgtcaagggatcgtggtaagaaactattcagcggggcgagtgcatcgttgagcgacatgtgtgccagtatgttgccgaccatgaatagagccatgattatgactgggccaatagcgcccttaatagcgcagagtccaatcaagcaaatctcagccaggtagagacctgttaacaaatgttgcagggctcgtgggtagactagtcccttggtgtcgacttggatgtcatatacgaagaggaagttgtatcggtaggcttggtatacaagataaagcccgaggaaagcaaatcccagaatcagaggtgcgatgcatgaataggtcaatgctaaaaagtcgagtcagttcatcttcgttaaagaatgagtcctggtatagggtattacttaccaattacagccatgttggtgaagatggggaagacattgccccagctgatgctagcaagttcgacccatccttgaaacagacgacgtggggagtaggcaaagaatgtggtgacaaatttgaacaccaaggcgctgacaatttgaacaagggccagggaactcatgctcaatccttgcagcatgaagtaagaaatgtagaaattggtcgccttgggtaagttctgcgccagcagatccttgaccgagagaggatccttgacaatctgtgcggtagctgccgacgcagccgatgtcaaggtcgtgaccaagaacacttgaaccacttgaaatacaaagtgagcgctttgtgtgaacagctcaactcgtgcccttgatgggactccggctcgtctagcgcatactaggtagaagtcagcaggaattcaagcaacaaagagaatccggagagcgtactacgacaaatgatcggcactagtgacatcaacgccgctagtgatgcggcaggcagaagaccctcaattgctccttttatgaaatcaggcaagtcaagaatgaagctgaggaagggaatgatcctgcagatgtatgtgatgttcgaaattgcaccgacgattgccgcaggaaatgaccaaaagatgaccatcgctgccaggaatccctggactgcgaatctcctcacgattctttgccaccagctcagattcagtgccgaccatacaacctcgcgaggtgagattccaataaagcgaggcgtcatgtgaaatggttggtgatgcgacagggtttgtagcgcgacttgtgcatcggcctggctgttgaattcgacaaagattgcactgagctgttttgcttcaccattttggtgttttgcttgcaggtttgctacttcttcggttttctttgccagctgagcccgataccagtgaatagagtcgaccttttcaccaaagaacttcggtcgatgcatcggacgtttgaccttgtgagaccatgccgggttgcttgactcgcagtccaggcacatgtcaatattcaattcgcctgttttgattgcttgggttcggattttattcgctcgccgaatgagcttggtctctgcggtttccaacttctcggctagtcgatctcgttcactaaccatcttcttcaattttgtgcagtcggaggtgatccaggttcggcggatggagtcaccaaatacttgtcgtagtttattttggttcttgtaagcgtccggaactgacatgaagaggactgtacgggacgacattcgagatgcgtaggcaggcgagttgaggtaggcctggcggaggtttgcataatacagactttctctaaccacgacataaaacacgaaggctatatattcttgtcagtccagctgtgttgcgagtgaagatacggacaactgactgaagtaaacacatgccactatagcattggcatagtatctgctggggttcttgacgttactgaaactcaagatgtcgagctcggtattgccgttacccccagtagcatgcagaggcagcagaatcggccatgtaatcacacaacctgtcagacatgtcgcagccaagacgcgcaaaaatcgcaagaaaagataaccgtctagcgatgagtggtggagcacatgattatcttcaatttttaaaaatgtcccgagccagttaacccagccagaaggcaactcgggactccgttgatgctcgtgtatatctggtaagtaggatctcggagcgtaccagcgacgctgagttcgacgaaagatcagaaataggctgacccaaaatatagcgtatacaagtgcaggcaatagagtcatcatcagggccgagcccgatgagcccccttcgccggtgagactgctggcgatatcaccggaggtggtggacgcgttgcctcgcgacgatccaatatttgtgtcattatcctggatcacattagcacggatttcagtatatggggtttagatgggaggcataccgttatacttgacatggtgagtatcgtctccgagttgagaaacaaagagatgtacaagccaaggaaataatgacaggaaagagggggctatatggagttcgaagtaaattccccgtcaaaaagaagcaaagagaaaaagcaatgctctttgcatggtccccgcttgcgacctgtcatccacagcgatccacaatggatatagacaaatgggtgagattcgtgaaattcgtgcatgtacgagctgataggtcagccctgaagatttgatcccaaagccgaggtgtcgtcgatccgatagtgtgtgggtcttttttgccttggcgaagatgtgaagtatgtgctctatgtatgtgtcagatggaatttcaggaaatatcaaactcgtgagagatctagcatttacatacctttcgtttgtgcagaagaaaaaaaaaaaaacaaaagacggaaaagtaacgagagagaggaacgaaacccagccgatgcgggtcttccaatcaaaaactattcggccgatccccgctgatcgagaaaaaacccctgaatgagatgagaactttgaagatttggagttcatgcaggttgtggaccaatagacctattgatcttatgaagcgtagtatatggaccattctaccctcccaagacttcgcttggagagacttttcggctcccctcttgttcccctcaatgggcttgagcaatgcaaggggcccttctggcggtggaggctggacgcatgggattacagcacatggggaatgttgagtctggatccctgtgaagtgtcaaaagatgcatcatgcagagaaaccggtatactcacgtggggtggttcgagattatcggctacggatctcactggaaatggcttctagatagatggtatggtagacagtcgaaagaggcttcgatatacgtattacttgtatcacttagatcaaggtgatgtacctagaccgtacttcgtatatgtacctcgactgcagactgtagtacaacacagaggagaaacgtgcaggtcttggcatatgcacatagggatcactcaacattctcagtcctttccagtcttcctttttcagagcccttacttgatctaaaatctatagccaaccttgaaaaggttacactacattcggggtccatctaagcctggacacaaaatatatatccaaatatccggatggtcaagcgggaacatatatggagatgcatcatgcgcaagttccgatgggggagatgggtgacgcatgggatgttgccaatgtgacgctttcctggttagtgacgagacgtaatatatcactaggaactcatcgtggacgagggcatgattcgaaatattggaaatagaaccttcccgataaattgcgcagagatgttgaagaatcggaacgattatatgtctatatacaacatcttcaaactaaaacttcagctcttaggttcacgattctccttggagacaggcaggaatttggtgtgtgaacccttcgaaaccaacgggcccacttcatcgtcgacgactcgagatattttgacggtcgtgaaggccattgacttccccacccgatcagcaacggcagaaatatccagagtatctccaacggtagccgttgacaggtatgaaacgtggatatcaatgcttgcgcctgttctctcatatccatgtgtggctatcgccatgcccccggcccaatcgatgatggtcgcagagacagccccgtgaatggtgcccctggaattgacatgttccgctgtgagtttaagtcgagcctgcacctggccgcggatggcactgatgatatcgacatcggatagaagaagacggtagataggactgtcatttttggtccgcttccaaatcccgcgcacatgctctaattcggtgccattcatcgtgggtgagtacggaaatcaagttgggaggatgaggatatggtcaagaacacagggctgacgaatgtgtagactttttgaagtcggaagtcagagtcggaggggccgagagcggaatgggccgcctttgcacggaacataccgaccatgttcttctggaaatagggagagttcttgtcactgaagtctgccctggatacattgataaactatccgagaccaacattggcaccctagtctcggtgctggcttgaaccgagctttatgacgaactggagatcttgcacgcccaaactacacttgaaagtgggaatactgacgagtgcatcgacgaagacaagatattgacaaaagaatcctgaagagatccaggctctaacgcatggcgttgatgtcaagctacgttatatggaggaagtgtggcacctagctgcaaatgtttaggtagtattggagatctcgtggtgccttctccgggatcaagcatcgacttcatctttctgatgattcacattcttcaagtaacgtctgtcataaatcttggcggtgtgtagcctacaacataccgtcgtggagtgtggcatccctgggagaccgacatagggcggtgaatctggtgatgattgcagaaaaaggggagataccaacaacacaaactcgtcgtcatttcgcaaatggagaagtcaacaaggacgttcaattcgtctttagaggccaaacagcccttcccgcctctgttggctgaagaccatatatccccagaagaatcgcaagagagttatgaagacgagagtatcacctcccccggctatgaggagattgaggtggatgacgatgcagatttccagtcgcactactcgttagatcaatcgttctccgatacagactccgatgaatcttccaatattgagcgaaaccacccatttcgccagtcctccggctctctctatggccccaatgcatttgcgcctccattctacaatcgtccacccacccctctaccgccctcaccatccctcacttctcttcttcggccgcccttctcgactactacatcacgcccaactactccggacagttcagatgtcgagactcccaacgataccgaggcggcagtcgccaagtcagctcgtcgcgcaaccaccgttccgcgcgccagccccaaggtccccacctatgaatactatggcttcgtattatacctagcttcgtccttggccttttgtaagtctgacgaaaacttgccggggcagttcctcgtagtctcctgcacactaaccgggtcaacttagtgttttatctcctatggtcttatctcccatcaccgttcctccaccagctaggcatctactattatcccaaccgttggtggtcgctggcgatccctgcatggttggtgatgttacttatctacatttatgctgcgcttgccacgtataatacaggctaccttactttgcccatgcacagcatcgagaacattgttgatgaggtcgcgaatgtatcggtgattgacggaaaggcacggagacgtcccggtggtgctaccaagatgaagcctggtgctacctcctatcagatcatgggcccccaaaatcgcaaggtcaattggcgagaaatttggagtgagggaactgacgccgtcatggacgtgccggtagggggcgtgtgtgaggttttgtatggccaggatcgagaagaagactttgactatccggctgcagactcatagcttctcggttcaatcaattcccttgccaattcaggctgataactgcaaaatactccgtattgatttcagtgttcctgtctacttcgatccacctgggaaatgacgtcgagttagaaatcaaatagcacgtgactagcagtgtctggcccccttccgccctccgcctaactgcccatatctccaaagccgactgttgagagaataatttcacaatgtcagcagaacggccctcaacaccaccttcgcagcccaagggctgggaagcaggacagcttccccgcgctcctatcactccagaacaacaacggaggatggtaggttccctccaagcttgcgccatggtcagcccgaactaatcagtcttactgataggaaatcagtcgcatgaaagctaaagcccttcgggagaaacgtgaagccgaactatctcaagccggtccaaatgactccaagtcggtgacaggcatcaagcgctcgttcacctcgatggcggcatccagccaacctgctaatatgcgcgatgcatcttcttcgaatcgcccactagactcgattaagccagcccgaaatttcacaagctacgtcgactatgattttagcaagatgaccgacacaaagggtgggtttttgacacaggaggatgacccgttcaataaacaactgcacgtgcccgatgggaaagaacaaaagccagcacatatgacgcagaaagaatgggaacgcgatcagatactccagtcactgaagcgaaatcgggagggaccctttgaaccaggtctcagtgtcctagatgataaaagcaagcagaagacatgtcgtgaatgtggcagtatcgaaattgattggaaatgggaagaggaacttaaatgctgcatctgccatacttgcaaggagaagcacccagagaaatacagtttgttgaccaagacggaagccaaagaagattatctcttgacagatcgtgagtgcctaatcacctatgaaaagagagatgtgctaatcagcccgcgcacagctgaactccgagacgaagagcttcttccacgcctcgagcgtccgaatccacacaaatctacatggaacagcatgatgttgtatctacgataccaggtcgaagaatatgcgttttccgacaagaaatggggctcaacggaggcgctggatgccgagtttgaacggcgagaaaatgataagaaacggcgacgggaggctaaattcaaaacgaagctgcaggagctgaagaaacgcacacgtgtggaggcctaccggcgcaatcgacaaggtgcttcaggcggagagtttggcgatgatctcggttctggacggaagcatgttcatcaatggggccgatccatcgagaatccagaaactggaattggggtcaagacgtgtgtagaatgtgggatggaggtggaagagctcgagttttagacgaccaaaataccatagcatgattgattattgtatgagaccacgatttaatttagcgcttgaacctatttgtgacttccattattcttgtgctgttgaagtataaaatgtcacatatacaccacagcagtcaaaatatatagttcccgaattagcaatcaaactcgacaccagcgatcctatcctaggtcaatctttcatacccatcaaacaatagcaacattcgaatctgcggtgcatctatgctgtggagtatatacttgcgccttgtataactagttaactaactagttaactaatgggtcatatagttggcgcctggaaatcaaggcatcaaccatcctctcaacctcgctagtcggcctgtcatgatccctgcggaacttgtcgaattggcgatcaaataagaaactacttttatattcacctttaatacaaagaccctcccaattcatccaattgcttactccagggctggaggtaacgtgcaggtcaaccttctccatctagaaggcggtcagcaccccccgaggccatcttcaccataacaaaagatcagtgaaggcacattctcatcctcataactttcctatcattgctcaaccttgctcctctcctttggatattcctcctcaggacgcctcatccacaggctgactcggcgtggaacgtggttccttgccgtcgccatcaagggacttggttcgcttattgcggatacgatttactggggtcaggagaaatcgaagctcgcacctcacacgtcacttgatttactatcggcctgattttcccatcggtacctcctgcagtgctttgacccttccgagactcgacccgtcctgtgtttgttcatgtcctggcaatctccatcagctatggctgggattggaggaatgcccggcgccatggatggttcgaatggcccacaagggacggaatacacattacagggtgagcatgaaccgactcgatttcttgaatgccattgactaatattcatctctaggtgtaatgcgcttcctacagacagaatggcaccgacacgagcgtgaccgcaatgcgtgggagattgaacgggcggagatgaagtctcgcattggtcgattggaaggtgatctgcgcacaagcaagcgcttgcatgaggcccttgggaagcatgttcgtatgatggagaccgccctgaagagggagagggagaaggtcaagaagctttcgaataacgaaaagtatgaagacgctaaggatcccaaagatgctgcacgtgaaagtgtcaacttcctgaaaggtatgtgcctcgcaattgtatgctagcacgctcggtgagatttactaactgagttattcaccagcgcatcgccccaagccgagcacggaccccaataatgacgaagagcgcgacagcgaaaatcagcatgagtgtcaaatcgaggacatagacaaagtccggggatatctgtccaaagcttcccacgaaatcgcgtaccatgttatacccgcctctcacccgccacctgacctgaacgactccgatatgtcaggccagctctatggcaattcccaactgtcgcaacagaacctggaagaggcttatcttcagcagcaacgtcagaaggcaaatcacgttatggcacgtgaaatggccttacagaaccaccaaccaatgtctaatcactactccgacaatgccatggctcgtgctcaaaaccagtatcttcctcgagatgccatggatcgacggtcaatggacccgcagcaagcccccggcacagcaattgaaagtcgaacccaagtatacgaacagggtatagtacacgatcgcccaaaccaggcacacgagacccagggccctcgagtgatcgtcaaggaggatgtgaatttggaaaacttgaccgaggaaagaacagaggatgtggatgggtggaattttgacgaaccggcggagcaagaactcgtggccaccgaaaccgtcccgcctcatcgcccggataccgatgctttcccaaatgccaactttacgtactctgagtcgaccaaggacgggtctttccctcaccggacgaagagcacggaatcaagtcgtaagagcgatggtgcaattgatgcccgggaagcgggtacgacgttcaaacaaaagcaagattccaacttcgaagtccggtttgtgctgcgcggccacttagatgtgattcgatctgtcatcttcactggtggtggtagctcggacgagcccgaaatctgcacttgcagcgacgatggaacgatcaaacgatggatcatcccaggtacttctggtggctctggagccggttctagccatagctcggacattacgagtgactttactcaccgaggacatgaaggcgctgtgacttctcttgccgcctgctcaccgtcccagaacaccttcaatggtggctctgtgttgggtgatgggttggtgttttcaggtggccaagatgccagtgtgcgtttatgggagcgtgggcggattgatcccaaggccaccttccacgagcacaaagatgcagtctggggactctgtgtccttcccgggaccatgggctctgtttttggcgactcaagtagccaatatggtggatcggatcgcatccttctagcctccggcgcagcagatggctacgtcttgatttgggctatcggcgcctcaccctcggctgcaaaccgccgtcaaggcagaagggagcggtcgaactcaaattcaatgccctccggttccaacttcccaactttgcctcagcccagtgttgctgcacccccagctttccattacactattgttcatcgcatcacccgccctaattctccttcccccacatgcattagccccttgtctcttgcaggcgtcaattttgtcgtctcttactcgaatgcctctatcattgtctacgacacgcggaccggcgaagaaattgcgggtatggccagtctcgagacatacgatggcacgccagctactggggtgaactcagtcgtcgccacgactgtcggctttgatggaacagttaatctcgatcccaaccgcgcgatggccgaagaagaagaagttgtacacggagctactggatcaagcagcgtagagggtgtaatcatcagtggttacgaggaccgatacatccgcttctttgatgccaatagtggtaagtggcatccaaagtgccttgatatttcccgcaatacgctaatattcgatacaggtcaatgtacatacacaatgcttgctcaccctgctgcgatagcctcactgtcattatctccggatggacgtgagctcgtttcggctggtcacgatgcaagcttgcgattctggaacctcgagaagcgaagctgtactcaagagttgacaggctaccggctgatgcgtggcgaaggagtctgttctgtagtatggagccgtgatggccgctgggtcgttggcggtggtggagacggcttggtcaaggtctgctctcgatgattgaaacgacggaatgaaaacccgtgtatgattcttcttgcgttatacctgtgtgtgtatctcttcgcgtttgctcgtcgttttctgtatgatcccatgaactggatgagcgattggccggtccagttatttcgagcatttgcaacggtgtttactgacgttgtgtggcctcccatactctcctacttgattttgctttttttttctcctttcttttttcaacatgtgtactttttacttcgctgataacatgttcgacaaagattccctggcgtgcgtggatgttttcttcccttcaactgttttggtacatgctctattctctatgggagctagatcccatcttgttcggatactgttccatttgctcttgtgatagggtcttgattgggtttgaaggagtgcctgataggccttgaaattatcccaatacttgacgtgtcggttgtttggtgtggatggctttttttccccagttctgcttgaacgtgcctatgtagtttgtgcctcggaaaccgatagctcatgttgtgtgtataacatttgaatccataccattcatcgagcaaactcagccttgttactctgtagactatcattgacacaagacatgtgaaacgacgggaacaaatacaggtattatacgatattgacattatttcgctgcgctgccatgaagatataatctatttggatgagctccacgcctccttgaacaccaatctcaaccgttttgcttcttcctcgtccttcaatcgctgctcgagatagccttgcaggtcatcccagaaagcctctgtatgcaacacctcctcaccactcggacctatagcagccttgggcggtgattcatcccgcttctctgtaatctctggttgagccatagcagattcaaccacctgcgcgccaccgatgatcatcaccccgatctcaacctctttgcctcccgccataatcgcaggttcatctgccaatacctcggccaatgtcttcccggtaccggtcactggcttacgcttgtataagattttgatcttgtctagcggaacttggcctccctgagcatcggtgacgcgcacctgcacagcatcccggatatcctggaccgaggtggtcgagagaggggcgttggagatcaggaattccagagcagggttgcgggcagacttgacgcggacagtgattgatttggatgagcctggtgcctgtactgacctcacctttttgggcattggaggatgcgcggctgaaaggcgggggagagtgtactatcgttttcacagagcatattagaatgatcttcctcaatgagtaaagctagagaatgttcgcatcaagactcacgggcactcgtagtccaatttgctctggatcgaagacataatcagcgcgaagcctgataggtcgcgagtctagcgtggacagaaatgatttggtaaaggtcagctccgacatggtgagaaatttggtagaaattctcaaggcagaaaaagagagagagagaaagcaaatccgagctgatagctgttggagtacggagtagtggaggtctggacctgggggtttcacttgatgccggtgggacaatagacacctggattataaggcatagttgtaaataagcacaccgcctttcattgcttctgtactgctggcagtcaccgcccgaagaaaaaaaaaaaaagacggaaagaaattacaagctccccagaaagcaaacactattaacgtccccatacacacccctttttcacaatgggtgtcggtcgccgtatgaagaagcagggccctccgggcccgctcgacgagtcaaaagtcacaatgctcaaaaaacgcaaggctagttcggctgaagcgcctccgaagcctgtaccagcgaagcgtcgcagatctaatgccgatgagactgtctcgaagaaggaagcctcgaagaagaaaaaggtcaatggtgctgctcccaaggttgattcaaaggaacagaagaagcagccgtcggtcacgaagaaggctgtgccggtgcctatgtctgatgatgatgatgatgatgatgaggatatggatgatgatgagttcggtgatctcgatgagatcagtgacggctcaattgatagcgacgatcaggctgaaggactgtccgatctagaggatgataactcagttgtcgactctgacgaggaaggccacacccgtggtgccatgttctccgacgacgaggactccgatgctgaagagagattgaccgctgcaaacatcgagggtctgtcgcggaagttggatgctgaacaacaagaggaggaggaagctgctgagcaggaaatgcaggaagccgccctgcagactaacatcgctgcacccgatgtgttcgccgaccaaacccagcagggacttgcccccgacctgcagctgcttcgccagcgcatcacagacacgatccgaattctgggtgatctgaagaccctcggcttgcccggtaggtcgcgtaccgattatatagatctcctactcgacgatatctgcacatactacggctacactcgattcctggcagagaagctgttcaacctgttcactcccagggaggcctttgccttctttgaggctaacgagactcctcgccctgtggttatccgtaccaacactctgcgcaccaatcgccgatccctcgcccaggccctcatcaatcgtggtgttgtcctcgagcccgttggcaaatggtccaaggttggcttgcaggttttcgagtctccggtccccctgggtgctacccccgagtacctggccggtcactatattctccaggctgcctcttctttccttcccgtcatggctctcgccccccagcctaatgagcgtgtcctcgatatggcctctgcccccggtggtaagacaacctacatgtccgccctgatgcgcaacactggctgcattgtcgcaaatgatgccagcaagccccgtgctaagggtttgattggtaacattcaccgtcttggctgcaagaacaccattgtgacgaacatggatgcccgcactgctttccccaaggccatgggtggcttcgatcgtgttttgctcgatgctccctgcacaggtaccggcgttatctcaaaggatcctagtgtcaagacgtccaagaacgagcgtgatttcctcgccattccccacatgcagcgccagcttcttttggctgcaattgattccgtcgaccacgcttccaagaccggtggatacattgtctactctacttgcagtgtgacggtcgaagagaacgaggccgttgtgcagtacgttcttcgcaagcgtcctaatgtcaagatcgtggacaccggtctcggtggcttcggtagccctggattcctgagttacatgggcaagactttcgatcctaagatggcgctcacccgtcgttacttccctcaccgcgagaatgttgacggtttctatgtctgcaagctcaagaagactgccgtgactcccgtggccaagtcggacgacaccgaaccccgttctaagggccccaagaagacccgtagtacttcctcgaatgcctccacggacgacgagtccattgaccggaccccgatcgttgatgagaacggacacgccgctgatttcgagggtggtgccttcagctccttcgaggatcccgaggacgtcgagcgcattgctcgcgctgagcgcaaccgtctgcgtcgcaagggtctcaatcctaagggtgttctgaacaagcccaagaggagcaagccagaggtgtcggagaagacaaccgaaacggtggcacccatccaggaagaagagaccaaggccattgtctcgaagaagaccaccaatgagccgaagggtgagaagaagaccgtggttaaagaagataagaaacccgtcaccaaggctaaggaagagaagaagaccgcagccaagggcaaggtcgagaagaaggataagaagtcgggcaagaaggccagcaaatgatcaatgacttgatcattcgtctctttgtgtataatcttcgtttttcgttcttcaggcaagtcaaaagcatcatgtattaggtccgggatccggcgcattggatataccttttgttcaatcaagatcaaagtgtttcaaaaaaatcaaaaaaatcaggacaaagagtacaaagaaatttaatgtaagattgtgctaaatcaaagatattcaatttatcccaagtcctaggtttaataactgttcttgtctatataaccaaaatgagagtataaaatcaatcgcatcactccccggccaaattaccgttcgctaaaatcaatgaatcgaagtactcgacaatataaaaatagcccgtaccacttctatgcccgataaatcttgatcaccttcttgacctctttgcggcacatcggacataggctcacgaggttcgcacaagccacacaggaacaaaggtgtccacactcggcgaaaactgcatccatttcctcggtgtaacagatttggcacaaatccaactcttcgtcggccacttcccagtagctgatgcccttgccgtggcgtttgccatccttgaagccgccgacatacttgttgcctgtcgtcttctcaacgtaagtaccttgcccatggcatacatcttcgacccaatcaccatcgtacgaatcgccggtggggtaagttagcttgccttggccgtggcgtcggccgaaaacgaagtcgccttcatatatcatgcctgtgttggagatgtgcttgcctctaccgtggtgacaacctttgaggaaatgaccactatagtagtcatttgcgaaggtggcttcgatagtcttagtgccggtgaaaccttggattggatgaccgcgagaataggcccacaggtactgaacaagacggtcaggactggtgaacaatcccgatgaagccagttgagtacgcctttgtttgtgttaggaccaaaagctaatcagatatatgtgtacttacttctccttatttaatttatcccctacgatgaaacataccccgtgcggagctactacatcatcgaagctgtcggcaggtgacaccgtggtgacggcagcaccatcgaatcgtttccaaacgaggaagtcttggcggatagggcgttgtaagtggcgtcggatggatgctttgacgttggcatcaagcctggagaagaatgaccccacggtacgaagcacttgattgtcggcgtcgaatatttgaatgaagtagtatgtatggcccacgggtaacttgacctcagatcgggtctgcgttagacctgccacttctggtgcagaagactgaacttcgggaggtgaaatagtagcggggcttgtggcatctgttaacggagttactgtaacagcagccgtggcttgttgatcacgggcagcgacagtagctaggaccacttcttgatctgctctttcagtagtaaaagagtcgttctctagagacagtgtggctaatggaggcagtgatccatcatcgatgatggagttcacggcacctgacgcagcagaacccccatggggagtattcccagatgagctagccacggcatctccttcggccacaggcgacacattctcagaagcttcgtgtatccagttctcgatgactcggtcattcggcttatcccccgaagagataactgcaggggggtctgggatggcgaagaattgagcgtcctctgttggaaattagccgggtgatggttaggaataaaggtgcatgcaataacgtaccctccgagatgatttccatccaaaatcgtatggtgctcaatgaaggatctagaggagcattcaaatccgtagtgcgatcaaattctagcgagaatccagattgagcaaaggagttaccaatctgccagaaacgaacccgctcgggaccaatgggttcagagcctgaggacttccatatagcaattctttttcgtagttctaccaagcgtgatgagcgtggcaaagtcatgtacatgacactgtttgccgctttggcctgtgccatgagatcgtaggaatcaaacaagctggtcaactggtcatattgaggaagcgcataaacctcaacttgaacatcatccgcagacttgtcaccagtgtggtacactcccgtttcatagtattgtttcaaggtctcagaaacttcccaaggcccttggggaccaggcaaaagttccgataccatatcactgcgaacgtacattgcgatgacaggtacgtcagggcccttcttgtaaatcacagcctgggaaggatcaagaccaagatgtggacccatggctgttttctgagtcaggcactccacgcggttgtcactgccatcgtcaaaagccagccatgtggtacccggaccggctgggcgaaggatgctgaagaacttgcctgaggtccggcggccacgatgaacaacatagccataaatgacatacttgctacactggccatcaatcacccacggagccaggtccagctcctcgtctaactccactttgtcataccgcagctgccaacgtttggtcttgtctagactatggcggccaaactcaacatgaagaaatgatggaagcgaccaacgaccgggcttagcactcaagtatcccctaacggcttcggacgtagacttggcttgatcaattggcatgtaaagacgcgagttgaaaccagtcggcagcatgtttacggtgacttcgccatcagaagacggagcatgtacaaccggactgtcgaagatatgagcgaattgtttgctggcctccgttcccttcagctctagctccaagttgcgacgcaggcgctcccaaaattcggacacatcgctcgaaaattcgtgcagattgcgcaaagtgctagtcacgccgtccgtatcgacatagctccgagggtgtgtctggcggcgaagctgccacatcaacctttgaagggcctcacatagaggcttcggcctagcatcagcattggtaagatgttcaagtacgtcaatattttgaatgatcttgcaaaatggagcaatgtgcaaccacgaggcaagcccggctacctctgggctatgattgatgattgagtcacccagaggtcggtaaccggtcaaggccatgctgtcccaagttggctcggaatcacttggatgccaccagagggacttggtggggtcgtttattacacgaatatacgcgtcaaatgagagagtatcgtcattcagaagggcacgatgttgacctcgccggcgtgaatgaatttggtcccatgggccgtggaaatatgtccacccccaatccaggttatgagtgttgaattgatgacaagaagactgcatccacccggtccgtggctcttgtgggttgtatacaatgacaccgacctgtgcggggacacgccaagggtccgaggttccatgatcagatgggggagtgttcctggccgcaggatattgagacttgtagtcttccaaccacgctgccgcatcgtccgtggctgaagtctttaattgaatctcgggtgtactatcatccagtgaggaatcggctgctcctcgacggaccgtaaattccatcccaggaagcttgccctctggggcgggcatggtggtagagcattcgagatatacactcaatgcattgacattgttcccccgaggatagaacttgattcgccaccaataacccccaataaatgctggtggagagcgaattactttgtcacgattggggtcttccggggtgcctcgaacacccttgaaggtccacgtgagacgggccttttcggtgggaatgtattctggatctcccaaatcacgaaaaaagttggtttcccaatatttgtctgtcaaggggttagcaaatactggatgcttcgtgatcttgcttctaaggttgacacctacgatcactggcactgtaatccgaaccaccgccttcgatctctttcatctcgtcatcgtctgggaccgttgtgtcctcctcatactctgcccaatatgcatgctccagctcttgcgagggcaggattggcgcgggctgaggagctgaacgtgatgacccgggggatcggtttgagtctgtattcggtgttctcaccactctgggtaaggggtccatggccttcaatgagggaatacccaatagttccaatagcttccgacgtgtttcaatgaatatatgagcgcatgtatactcctgtataacgattgataagggcttatcggataagaagaaggttgcggagatgtccacgggtggatagaagggggtccggtagatagggagaggaacgagcgaaaacgaatgaacaagttctagaatagggggggaagaagaagagaaagaaaaaaaaaagtggaaggaagaaaaggaaaaagaaagaagataagaaaaagaaacgaaaaaaaaaaaaaaaagagtccgggggaagttgccgagtggagtctttttgtataagactggattgcctaggctcacggatgaagatttatatgtagatagggtgcatagatatacacctaccgagtagatatagtctaacttcaaccttagacaacttgtctattatacagcgtacctaagtctagcggtgtgccaatccgatccccactcaggggagaatatccttatatgccgagttttggaagattcggtggcgacttggcttatcaaatttccctttcgccactgggccttgcaatccctgggttatctgagccacgccacctcggaaaactattcacttttcaggcacatcaggcatatcagtcatgttgggccgatcaacgtacctgtacttgtacaatgagcgggggccaaccgtaccaattgaaacgatcgcgcgatcaaaagaccctcgattgacaccaaacggaccacttttcgacggtgagtgactattgattggctcttggaaaaagaaccatttctagaccgcgggttcccgcattgcttggcaataagtcttgtcgtactgagactcgacgaggggtaaaagtgaaatcaattttgtgtcgattcagcacgggcaaatgaagcagctacaatcatagggaatactgccgtggcctcagcatagacctacagatgatatggaagtcagcttggcaccaaaagagatagaacaaagagatcaacccaccttgacagacctagcatccgtcttgatcttgccccagctcaccgcttcatccggccgcgcacctgcatcgctgccatcgaactcctgcgcggtatttacatacactgcgtgctcggccccgttgcgcatcaggcatgcattggcgatgtggtgcttgaccaacccaccgcccaagatgatcatgccggcgcgtgtcgctcgaacagccatggtgttgatacggcgcacatcgtctacaatatccacccggagtcgttgtggggaagacttgaaggtgtgaaagtaaagcatatcacccagagatccatccgtcagggccggacagaacacgggaattccattccgggccgcccagtatagaaccgaatcctcgtggtcgatctcacgacccagtcgttcggtaatgcggcttggcgtccagtgaagctcgtcttcctcgtctccagtctcccgagccttgatctttgcagcctcctgttcctccaacatcttgtccaaaataggtaccacccagtcctcgaaagcacagtagttattgttgggtacgaggaggttgccaatgcggttgaggcccttggcacgaaggccagcaccgggagtcgagaacgatccaagatatgtgggggccaagcatttgatcaaatcctcctccacaccccccgcagtggtcacaatggcagagacatggttatgtttcactaaataacgtagggtgtctcgaagaccggaggaaatcaagttcgatgtatagccgaggaagatggtggttttatttcccgtttcgggatcacggaaggcgcgctgagaaacggactatcagactctaatgatttaaaagattcaaagattgcaattaagttcataccatttcattgatgatttgagccgcctcggccaccgcactgccctggaaaccggtatgggccaggctgtccaccatttctgcgacagtgatatcccttccttggaacttatcaaaatctaccccgctcactatgtgagatccctctgggaccggttgcgagctcttgaggacggagtcggtcaccgaagagggaactattgaaggctgctgggcgctcatatttgcgatcggattggaagggacgggaaagaaaataagagaggaattggcgtgaaaggcgttaaatccgcttaaatggggttatcaagatgaggagtcacaacaaaaaaggaagatcagttcggagtagaaggagaggggcaggtgatctttttttttcggcggggaacttgcatcagtctaggcctggatgcctggatgccttggggccttgatgcctcaggcatgtatccataattagtaccattctagaattggagacttcaaccctggagataggttagaatgaataaagaatctcctataatattggcttcatactcttccaagtgtctcatgtctacaaatcttatctctttcgacactatactgctacattcatacatgtatgttgtgctcttagacgcaacattcaatgcaaatagagtttaggaggcacatccccaccacactagcatctaaccgggttagtgccgagccccttgaagtctcacgaactcatattctaaacatattccaaacatattcttcctcgacctgccttcctttaatcctcccacatactccacagagtatacattactctttgattgcataacatccggcgcaaggagctcgcatgatttcgccgatcttgtaacgtgctagtgtttcctgtttcaacgttaaattccttcgctcgacgaatctgtcaatctgtcaagttggacgcttcatttgctcaattctcaagactccaatctagcaatcgtgaaaggaaaaggaacagtacgtgacattggatctttccctcccaacttgaaaaaagacaacgccttacccgatcgggtatccgtgcgcttcaattcttcatatggtccgtgcattcatcgtcacgtgcagaccctcccgagtgtccgttctccatctttgggtatgtgatgcattctgcattcctaccgccttgggctgatttgcactgtacattgaacgcgctggagcgctaaccagtctatagcttcatgatagcatgacgcgataatgtcctcccgatttcccccatcgtccgggttcaatccccgtgaccgttctccgcagcgatttggagaccgtcgcccgccggctggtcctcgtggtcctgacgacgggcctgcaccatttggtagagatccaccccgtggtcctcgggctcttgttgattcccctcgtggtggccattttggtggtcgtggtaggggttatggccgtggtgactttcgtgaccgtgaccgtgacccacgagaccgcgaccgagatcgcgattttcgagataaccgcgatggcccgccgtttcgccgagacatggaccgggactgggttcgccgtgaccgcgatttcgatccccgggacaatcggattggctttggccgaggccgctcaagatcaccgacgcgcgactttcgagacataagggaacccccgggccgcgattttgatctggttcggatacgacgcaactccagggacagcatcatatctgcatcttcgggaggcccagaaggtccccctcctaatattggccatatgcaccggggaggcatgcgagggcgtggtcgcggcgattgggaaggaggccgaggtcgtggtcgtccacccttccttgatgatcgtgatcttttccgtcgccgtagtcgatcccgtgaaccatggcgtggacgtgatcggatggtggatcgcgatagagatcgagatatggaccgggatcgtgcattagaccgtgatcgggtaatggaccgagatcgggaccgagaccttccacgcccgagagagcgagatcgagaattagatcgcgatttggaccgtcgagatcgctttgaccgtcgcgaagattgggacaaccgacgacctgatcgcgaggaccgtgatcgcccagtggacttttggaaacgggaccgtcccccaagccgtgcagatagtcgcgcagccagcggctcaactacatcctcacatgctcctacagcacccggccctggacctggaccaaccctagcagatcgtctgcccgagcatccacaagtggatcatagccggaaatcttcgaccattctcagcactacggctctggaaactacgcgagattctgagggaaatgaccctatcgctgttcgcactagtggtactcgactagatgctgttcgccctgaggctgttcgccctgatgctgttcgccctgaggctgttcgccctgaggctgttcgccctgaggctgttcgccctgaggctgttcgccctgaggctgttcgccctgaggctgttcgccctgaggctgttcgccctgaggctgttcgccctgatgttgttcgccctcacgcttctcggctggatgctgttcgacctgatgctgttcgccctcatcctcggccggctgctcctcgatcggatgctgttcgctctgacggtatgaaaaaccctggaccaatcattcggaattcaccacccccagccgccccccaggtgccggcctttggctcagtgacttccccaatcacgaatgcttcctcaaataaagttttttcagaccaacgcacggcacccaattctactttgcccacagagagagaccgctatgaagtaccgcaaagacaaccggcccaaccccctacagggcccaaggcagaaaggatcgagagcatacagcctcttgaacctcgcagccgccctgaaagaccccgtgagactggcaagcaccaagttgtgccccctcgcctctctaaaccgtctatcaatttccctgatgtatcaccacccaccgctccagctgccatgactcggccagatccgggggcagggcctaacgaaggatttggggccggaaggtcgaactcacttacctcttcccccactttttcacgaattccaccgcctgccccacgcgcattatcccgtgaaccctctatgtcccctcaaatgcaatcgtctggcattccaaccggccctcgagcattgcaatggaaggctccctccccgcgtggccgtaaaggcagcaaacagtgggtgcgaccgggctacggccgaataccctctatttctaatgcactgccgaagcaagagcctgttgaagagagcgaaggtgtttcccctgccaatgaagccacacggcctctattagcacctgagatagacgaccccgagagtggcgagattcttccccatgaacctgcgagagaaccctcgcctgtttccccgccattgaacctcccaccccggcgtagtttatcggctgttgacattcaaacaagtgatgcaaatgaaccttctgagatgagcggcactgataaacccgccttgatcccagactttgaaggttcaagtgatgaggaagatggggagaacattgttttcacccaagaatatcttgatgacaggaagcggatatttgaaaaagatatggagtcactgcgagcagaattgcctccatcacctttggaagattcggccattgtggctcttttgctaaaaatccagctacttggcatggtagccaacgaaaagacagttgaaaacccccccgaaccactcgccgaaccacccaccgaacgagtattagaacaaccagtggatcctgtgccttcagtagaggatgaagagccagtcgaccattcaaccactgagcgagtggtctcttttccctccacactacccgagcgcgaaccagagccaattactgaaactatcatcccccccatggtgccacctgatgaggttactatcgagagtctcccattcttgcactcaggccctccaatacctatttcagatatggatgtataccatgagaacattacgatccaaaatcgtctcagagacacgttcagcacagaactttcgaaggtgcaagcgagaactttcagaaaaaatgcactcctcagggacgagtatgtgtctcactacaagctctggcgaatggctatttgggagctcgatcgtatgaaggagaagaagtccgtgactcctggtccagccttctcaccaatatccacggttccaactaccccggcgcccatgccggaaggccgtgaaggccgtcgttacaaaggaaatagcgagcttgatttcctcaatgctttgaaggcctccgaaatctccgcccaagaagagcttgaacgtcgacgaatcaagatggccactgctcggcccgatctgggccgtgaagcgatcattccgaatatgctcgaaccgcgggaggtaaaggcccgtatctacaaagatgtgaacaacaacattgagtgtaatatggctctggatgttttcggtttcgtgccgcctcctaatgatttcaccccggaggagcatataatctttacggacgccttcatggctcatccaaaacagtggggcaagattgccgaatctttgcccggtcgaaatttccagcagtgtattgtacactattatctcaccaaggaagagattaagtacaaggccaagctcagcaaacgctggaataagcggagcaaggggactcgaaagggtccacgaccgaagtcaaatgccctcaccgcagacatgggtgtggtgaaacctgaccatgtgggtgaggaggagccgcccgctgtcacagacaccggtcgtccacgacgtgcggccgcgcccacctttggcgattccaccgaggtagagagcacgccgattggccgtcggggccagcttggcaaggacggcgaaccagtggatagaccttcgactcggcgtggcggacggggcggaggtactcgcggtgcacggcgcgtgaagagcactactcaaccagatccgaagacccatgtggtaatgccacagggcaatctgcccccgattgtaccgccaacaccacttcatcctggaagcgaaatggatttggcctcggatcacatattggaaggatatgaggcccgcgaacaagagcgttccgaaaaagaatccataccgccaatttctcgaggcagggtgggacgtgggcgagcgaaggaaggagtttatgtcttcgagtctactgaggttgaaccttttctgggaactaaacagcttgagacgggatatggatccttgcaaccaacgagttactggtctgtaccggagcagcgcgatttcccagcgttgctgggacattttggtcgtgatttcgagggtatctcgggttggatgaagaccaagacaacggtgatggtatgtattgggtactgagtcccaatttttgtttttcttctttcccctaatgtcttatgtttgtggctaatgtgcaggacgcaggtgaaaaatttttatcaacgccgcctggactcgggccagaaagactttgagttgattctaacggacgccgaggagaagaaggctcgcggtgaggccacagggccgcttcctgtcccaagtgttgcgccaaagcgacgatacgaggcaactccgtcttctattatccctcgtccacttgcccctcatggggaccctatggccgaggtcgatgaaatacgattccctaaaggcaagcctgttggtctctcaccgcaacccatgtcgctgcatggacgacctctgtccgacaaggaccggaatgtcggtcgctaccagccactggcacaagcttccgctgcttcacctgtgccgtctaccgcaactctaatcgaagagtcgactcgggcaattcgcgcgcaaggaggtccatctcaccgcgttcagggcccacgccttggatatttcacagaggatagacgagactcttcgggattgccccatggcgcgtctcgtgcgcaagaactagcgatttcctcgcgccatcctgactccatgccgacggatatggcaagaatggaacccttgtccacacagggctatattcccgcgcagcagccaacttctcacctttcatcaacccactcacgtcacgccagcttaacacaaacccccggctcgccatccctgcaacttagacccgaactcgacatctcgtctgttcaccgcgatccttttgcccaaagaccttactactcgcttgcaggtcagcccatgggtctaccacagtcgcctcgtcctgggttgtcgccagtgaaggacgtccctcgcccgagtgcgactcccgctcccgacgcaactcgtcaggtgcctgcaaagcggtctaacatcatgagcattctcaacgatgagcccgaagagccccaaccgcgcaaacgatttgccagtgagcaggctccatctgtccctggcgcaacctcaggcataaacccaaggcccatataccaggctagcggaccccctcgccatgaagacaatattatgtcaggcatgtcgcaaaagccttctgtttacgcccagcaaagccaatatcagccgtcatctcgcggctactcagagtactctggctatggtccccctcatggtggctcgggcacatcaaataatgactggatggcacggtttgatccacgggcgcaacagactccgccacagcctcaagctccatcactgccaccacaacagcagcaaagcggccgtcagggttcgtattcatcttacgcggcaaatccaggccaatcctccttgacgaatctttccgcgccatccccagcgccgactccgccgccaataaatgcctctcaacgatcggcttatcccaacgttttctcccaaggctcctctgctcaaccacccatggcctctggctcccgagatatggcctcgcaaccgggttcctatcgacaagggtcacctggcccgcgtcccggtatggtgtatggctcccgacaagatccaccaacgccagcgcagtcttcggctagcctgtatggtatgcatccgcggcagtcagcaacgccaaatccagtacagccacacagttatcaacaacatgtgcaaacaatggtcagtggatcgcatcagccgcaatcccaccgctcaacacctgtcaacttaccaggtgcttcttcgcagtacgggcacaacacccctcctcctcagtcccaggctggccggtcaatggcatcgctggcgagcctcggtcgctcatacacccctccatcggctctacattcctcgatgagcgggggcactatgggcggctatgccccccctcagtcatctgcgcctggatcgataccgccactccaccaacgacctccgggatcgcttggtgaccctgtatccacccaaacacatcaccgtgtctacagccatgggtcggctcaaggcgtactaccgccgccttctcaacctcctcgctagggtcctttgttcgattgatttgaatgaacttcatgtggaaggcaagaccgtgacgggttcggttgtaaattaatttgttgtgtttgtgtttctttctcttgtttagcgtcctggcatctttgccagcgaggatattcatttgattatggtttatatgtataactagatgaatgattttatgtgtcaaaccttgatgtaatgaatttttacaaccttgtaggactaactcaatatctacattagagtgaaaagtatgccctcatcaagacatgttaccggtccatctggttcatatggctgggcaggttccattcatcatagtccaaatgcacaaaggcacggtcgacagtaggcacactctcgatgatatactgcaaactctcaccaacgtcatgactatcccgcaagctgatcttttcatccacaacaaggtcaacttcaacgttcagcttatcactcgcgtagtaggctttcaagtcctgaattttatgaatcacccgggagaaccgcatggtcatatacagcaaaacactatgatcgtcgggagaggcagccgcacccgtcaggcgctggatgtattccgcagcggtctgaccccagttccacatgatgtagaaggagaggaatagaccacccaagggatctaagtaccagagatttgcagcagtaccaactacgatcggtggctgttagttggtactctatgtagggaacaggaataagactgacccagtgggaagatgatgctgaacgtgttaaagacaacgtcagtcatggcatcctgggccaggacctggacgcttgggctaggaatcaatcggcaccagatccagcagaggagcttaaccaaaactgtaccgcccatcagcgagattgatgggatggatagcttaacaaccgtgcggtcgtccccaatcaattgtttgatagaagacagcgctacttgaaaaaaggaagtcaccatgatcaccgagaagatcaacacactgacaggctctaaccggcgtcggctgatgggataccggttgcgatcctgtcggcggatcataatggtggtcacccagacaatcactgtgctaagaaagtccaaaaccccatcaactagacctgcgagcatagacatggagttagtcattgccatgatagcgatctttgaagctaggagagcaacgttggcgacaaaattgaggcgaatggccaggttgatgacgcgctcctcgtcatctagggacattccaccatgcgattcgaggtcagggaatggctccaatgggctgtcttctgcgtcggaagaatgaaccaagggtgtcgtctcatcggggatccgataaagattatgcggggtgcgtttgacccttccgatcttgggattgggttctggtgcctcggtctggttatcctctaacgcagacggctgaagaattctgtttcccgaagaatggtgattgcatccattgtagtcttcgatcaggttatggggtagcgaagaatccagtagtcggtcaatatagagatattgggagatcagtccattgtttcgttcatggtatttccgactattccgggagtcagtgcctagtttactgatgtgaggggcaagccgacatttcctttggaagattctttaatgactcgggtgatttgtagtagcgtttcctgcggcgccggttaggaccgtaattgcatcaagaaggagagagatagtaccactcatatcgaggattactgtgtccaatcaacaacgatccgcgtctgagaataagtcgcctttcaggtgtatcgtcatcgagatcgttcaaggcaaggctcgatgtacgagaagggaaaaggttcaatatgtgttggcctctggtggaaagaatttcacgctccggttctaggcttggacgtcggggacgtagaacgggcgaaggcgatgatggaggggagaaaatcggaagaaatgtttgggaagacatcaattggtccaccacggtgaagaagtgaagctagtaggagctcttttttttgtgcaaggtaggacgcgtaactagttggttagttatggtcacatgacttctgccttggtgattaggtgtcgaggtcaaatataaacatcagcatagtataattgcatcggttgtattcaatggtagaaaatatgacacgatgcacgatgtatatctgtatacaatgtatgttggtcgcatatactccgtactaaggctcaagttggacttgcctaaagtggaatagtggctgaatgcttcggtacgtcgaggccgtacgttcttcttctcttctcctcatcttctcatcttctcatcttctcatcctctttgttctataaggctcggaataggttcagtattccatgaatatttcatggaacctaacagtatcaaccatattgccttcatctcaggtccgatcgacactggacctgacaaatcctactttcacactcactacttaacccaaatcaaccacgcggtcaactgcaatcacctctttgttattggtcccatcccaagtggtgtggatgcagatgcactcgcatacctcttggcataccctatctcacctagccgagtgaccatctttgtgactcaagccgagaatgggatgtggggggcgcatttccgctctttcggagtcaatgtgcgggtagtggaaggccacacgagtcatgatcgagatgcggctttaacaagtgccagcacgtacgatattctacgggtgcgcacaaagaaggaggcgaaggccttttatggccacatgtggcgtgacgggcatgtcacgaatacagagcgcaattggaagcgacgtcgaggaattgcggagtatgagattgtaggagaggagacgatcaatcgttcaatggggtatgacatgggaccagccctaagcaccggcaggcgtctattagcacgagtcagcaaatcttgcaaaaagccgaacagttgagccacaaaatagccacagagaagagagagcacaagagaatatataaagatcaatacaaagaatggggttcccatcattagcggaaattggaagtctcgttgttccgcggggaaatcattgaggcgagtgcggaatgagtattccgtctatgccgcgcagtggagacatcctcccccggactgatgcgttgttcgttgacctataagaaacggcttttactgatccggtggcttatgactggctaatgaacggccatgttaccccagctcttgtttccccgagttctcgaaactcggaaatatgccgtagccgagccaaagaagaaccctgagatggagggggcctataagagatgcatgcgtctcccactggtcatgaaaatctgcaatttcttgtcaaacttcctctatcatggcgatccaaacacttgcagtcgccgttatcacggtggtgtatttcatcattcgctattttaaccgcaccgatatccctaagatcaaaggcctcccggagatccctggagtacccatcttcggaaacctcctgcaactaggagatcagcatgcaacagtcacggggaaatgggcaaagaagtttggaccggttttccaagtgcgcatgggaaacaaggtaagtgcttcgctttcacatgggaggtgacgagggagtttgtaatctaatgtccaattagcgcatcgtgttcgccaacagctttgaatccgtccgtcaattgtggattaaggattcatccgctctgatctcccgcccgactttccacactttccacagcgttgtctccagctcacaggggttcaccatcggaacatcgccgtgggatgattcctgcaagaaacgccgtaaggcagccgccacagcgctgaaccgaccggccgtgcaatcctacatgcctatcatcgatctcgaatccaattccagcatcaaagaactttaccgggacagccagaatggcaaacgtgatgtgaatcccactgcatacttccagcgatttgccctcaacaccagtttgactttgaactatggcttccgcattgaggggaatgtggatgatacgctgctgcacgaaattgtgaacgtggagcgtggcgtgtctaacttccgcagcacttcaaataactggcaggattacattcccctgttgcgaatcttccccaagatgaacaaagaggccgcagacttccggggtcgccgcgataaatatctgacctacttactcgatatcctcaaggatcggatcgccaagggtaccgacaagccttgcatcactggtaatatcttgaaggaccccgaagctaagctgaatgatggtaagttataaaaaattcccgtgtttgttgaactgagtactcatattttgtctagccgaggtgaaatcgatctgcctgactatggtgtcggctggtcttgacactgttccgggtaatttgattatgggaattgcctacctggcatctgaagacggtcaaagaattcagaagaaggcctatgatgcgatcatggaggtctacccaaatggggatgcttgggagaaatgcttggtagaggagaaggtcccctatgtaactgcactggtcaaggagatattgcgattctggacagtcattcctatttgtctgccacgcgagagcaccaaagatatccaatggaatggagccacaattcctgctggcacgactttcttcatggtaagccgctccttgtttctgtcctattcgtaaattactaacagagcctttagaatgcttgggctgccgattacgacgaagatcacttcaaagatgccgataaattcatcccggagcgttatttggaggtcaacgagggcgcaggtactccacactacgcatatggagctggttcacggatgtgtgcaggctcacatctcgctaatcgcgaactgtttactgcttttatccgcctcatcactgctttccacatgcacacggcgaaagatgcagccgaccgaccaatccttaatgcaattgagtgtaattcgattgcgacagccttgacaaccgagccaaagccattcaaggtcggatttagtgcacgcgaccctaagaagcttgagcagtggatcgccgagagcgatgaacgcaccaaggatctgtaagaggaccatattttggtttcctttttgaaaagaattctgttcaatgtggtttcctctatttttcggaggccatttatgtatctacaatatgtgaaatgaaagacaagggagtatagatatagacccgtgttggacctatataatcgactttggcctctctgcaggcctttaagaacctgaatgtagattagttatctgctagttctgagattcaattcctaaatggcacattttcccagtctataccagtctgtctcatttgataattcccccggggttccaaggtttgtggcggtttccccggcagaatctccccgcattttctctccgcacttttcttcctcttcaccctattccgttcagttgacatctgatcgctttaaattgtcttcaattgcatcgccttggatgatgaataccccgcatgtttaccctgcccccgagagctgggataacccacattcggtcgatgatacgaacgatgatcgcccgcggaaacgccgcaaatacatcgccaaagcctggtcagtttggaaaggttctcattcgagatggagtcctaacgagatagtgaagtaatggatgtaaacgtcgcaaaatcaagtgcaatggccagtcaccctgccagcgttgcggacgccagcatattgagtgtatatacgttgagaaccctcgagacagtcccgccgaacaagagtaatgcccaccccagctcggggcgtttaaaacaccactaattatgctttcaaagcaacttcaagctacttttcgatcaaatgagggccacgcaggaccagatttcccagttgtctgccagtattcggtcaatagccggcagcgaacattctcctgggggtatttccgctaccggcacctatgggcagctccatactcagcgtccacttagacgcctgtcaacagctagagagacatcatttcaaggcccgacgacatcggcctttagttttgaccttgcgaaatctagcctgcagcagcgcgggattgtggaacgtgctgaggctggcgacgagggcgatatgactcaagaaccttcaccgctggcgtcgccatcggcaccaaataaggaacttgaaacacaccaggctcttgatccactttgtgttcttcccaaagccgaggcacttcgcctttgccaagtctatgaggaggaaatgggcatcatgtacccggtcctggagctttcggagcttttggaccaggttaatcttctctacgggccgagggaccgcgcacttggaccgaccgcccagcccgagggacggaatggactgtttcgcgaagacgtccatatcctacgtgtagtttttgcgtgtgcgttgaccgctgaagccagtggtcggagtgaacaggctattgctctctttgacagtgtacgagaagttcaggacaattgtgtctggggtccgcccgaaatcaagagcatcatatttctgactctcgtggttcgtcatacccaatcaaatatgaatgcgacatgctaattacaacgatagtcaatgttctattttcaaatagatgaggaaattttagcgtggcgcactgttggtattgttgagcgcatgtgtctcgaaaaaggtcttcatcggcgggaaactctaaatcaaccggcaatcatggctgttgggaaagatcgcgttttgcgactcttctggtctgtatatattttggatatgcgttggagcttcgggactggaatgccgtttgctctggaagatacagatattgacccttggctaccagagccggccgagaaaacgccctatctgcgcgtgatgatccggtacagccggatcgcagcgaaggtatggaagtttatatcagcattcaacaacacaaacgaaatcaaaaaggaagagatgaactatttggattggcaggtgttgcgttgggtgcatgccattccagactcgttgcggctcgaacatccgagttctgcggagtctgagactgctaccgaaggctcacggagcctgcgcagactgcgtgctctcctttatcttcgtgctaatcagctacgcatgctcattcaccgtcccgtccttcatacttcagcgcatgttatgcggtatccaggcgaatcagaaaccgtggtgaaaatcgccaaagatacaattcgcttcattacccgcttgaacgatacatcggacatctatcatttacagcaggtggcttttaattggtttctcgtctcagcacttgcagcgttattcctggcagtagcccaggctccaacacaattcagtggatcatgtaaggaggagttttactgggcattggagctggtcaaaggagtctcagcccagtcttatatctctcgccggctatggaggtctattcgaagcctccgtaagcttggtcctcaactgggtctggggcttcagaaaaagtgcctggatatcgaagcgggagtcgaaagtgaccattcaaatgtccacggttcccccgcattacccctttctgccagtagccagagtcagacaccacaagacggggaacagatgacacaggagttgatggagtggtttgaagccgtggggaatctggaggaccaaataatgggcatggggacgggccctatgccaaatggaggaccttaccagcaaatgcccgacggggggtttgtgtttgattacggcgaagaattgtcaagtgtgatgagagatttcttctgattatgtacaacatgtgtcgatgtgaagtcttagacatgcgaatttgaaaaaaaaagaaaagggtgggggaggttaagactgacaatatccaacattgtctccggatttgtggttacattaagaactctgttctgtttctgatttcatgataatatgtgtagtaccccagaaagaatatcccaatattggagaggagaaaaaaagacagacgtgaagcaatatatgaatgtgaattccccggggtattcgatttcttcccgtgtgttgtaccgtgccaacatcgaggttgaactagtagatatatttaaagtccagttccccatcgcccgtttggactcgccgagtctcttctctttcaccactgataatttgctccttcaccttgttctcttgccgcaagtagagaccatatacagttactgtgacctgcgccaccgcaagggaccctaaggagaaggagttacccagcacataaggtgatgtgcgatatacctgaccggcaacaataccagaacagttggcgactgtctgctggagaccaattgcgagagcacgacggtattgtggggcgacattcacgttcagccaggcgatattgagaccaacggacgtgtaggtggtgataccgatgagaaaagtggcaaagtataggacggctgtattctctaccgtgagaagtatgatgtaaccgacgatgccgaagatattagctgcgaagatgtactgtgaaagagttagtgagaaacggtgcactagagattgcaaggggctaaacgcaccgatgcaaattgggaatatcggtctgagcaccaagcaattgcgataaagatcatggcagcccagacatagactggaaccgtcaagacgttgctcatcagggagtcatagcccatgccacgcaagatagttggcaggaaagtgctgaacccatacaagagaatatcctgacagaactggatgagagcgctgaacatcaacttggggtctctgattgcgatgcgcatttcttcccagctaaactcttcacttcccatatacctgcgacgctgctcgttgcgtacccgcatcatccatttctcctcttcggtgaggaagtaggcttcagccgggttatttggcaaaccgaaccagatgaggatggcacagatgaagctaaacagcccttcgatgatataaacccatctgaaacattgtaagccacaatatccttttgagtgggataacgagaagcatacctccatcctgctttgccaccaatcccgtccatctgcaagagcccgtaggccaagagaccacctacagcccccgagatggcagcgcaactcatcaaataggaaacgcgctttgcttgctcctctcgacgatagaccatggttaggtagagattgagacaagggaacagcccggcttcgcaagcgcccaagataagacgagtcgcgtagagagagcctaccgactggataaatccggtgaagatggtggtcagggaccaaacgatgcatagccccgtcaggatgttgcgaggtgtcaatttcttcatcatgaccgcccatggtgcttcgaaaagaacatatgtcacatagaagatggagacagcggtcgaaaactgctctgttgaagcgttgatatcctcaggcatattggcaaccttaacatttcctaagctttgtgagctttatgctctttcttggagatttaatcaaactcaccgatactcgatctgtccaggaaacaagtgagataggtcaacataatgatgggtacaaaggcagtatccaacttggcgaggagttttgcctctttctttggatctaacaccacatccaaaaattcggcgacggcataattggcttcttcggcatcctctttttgtaaggaatctttcagctccaagggtatattgtgaacggtattgtgggacatggctgcaatgggggttgcagcaaaatcgagggtttattgaaacaagtcagaactaatgaccattttaagaatgtttcgatcgtgacatagtggatcatagtgaaacggactcttatcttgggccacgcgatactggaagccgagtccactgtgagtgggtctatcgggccgatggtgataagagatggcagcaggtgagaggttgaagaggtgaagaagggccaatagagggccaatgagaagggtattgaggggatatcaattaatgcaagccaatccgatgatgcgaacagatcctcaccagaagaggcaagtcgatacggaggtgcgcgtatgtagtgggatgttcaggtgtaagagacctaactagggttaccatccccgattaataatctgccggcaatttgattctccaccagttgaaacttgacgacagcgggcggtatatccctcttggaaggcggtgtactatctgtggggtcttccccaaccttttccccagacctatcggtatgtggattccgaaaatgataaccgagggtatctgattgtcaagaggtagatattaatatgattgatatgtaaattgttaccttctacttttccgagaggaagctcaatatggacagtctcgcccagcaggcacgactgcgctgtcgctacaatcaactgaccaataccgcgggtgttgcaccgggatatttacaagcaaatcttctggtacttccttcgaaatatgctgcggatttccatgatttgtgtttgcgcaacccagttccttgtcccttactgggaataaccactgttcctggtgacccaaacgccgttagaccggcagaatgtattcggtccggagattttgatattcggacggattttcccaaataccgagtatattcgggcggaaagtgcattgagagtcggcatgacttgtccgatttatggactaaggaacatgtgggctttttaatcgggtgttcgttctcctttgaggatgccctgacggcggctgggttgccaccgcgtcaccaaaagactggcaccatagttgcaatgtaccgatcaaacattccattgttacccgctggaatattcacaggcggccactgtattgtatccatgcgaccgtatcgtccggagcaaatcgagagagtgagggacgttactcgggcctatctgtcgacgcatggagagcctgtcgcctggggatgggatggtgcgcagcaactaggaattcttgatgtggcaaagccagactttggagaacagcaaatgttcgaggagggcgaagttcccgtgttttgggtaagttaggtagtcacatatccaccttcgacggtttgatctgacttcatcccaggcctgtggagttacacctcaaattgccgtcgaagcagcaggtgataaaatcaaaggtctggtctttgcccacgagcccggacacatgctagtcacggattggacagcagaagacctgcagaaactcaaacccggaagcatctagaacaaaaaaaaagaaatcaacatgaatccatacaatcatcaacgtgatgatacttctcggctctattctcttgtgacccaacacagtatcaacttgaaagtcttcaaacaccatcgcgatatcatccccaatggcaacaatgccaacgaccgaaccagtcaggttgtaattggttagggggtttgggccagatggaagttgtttcatattctttgtggttattctaatgtgattcctcggaaggagatctcgtctcttcatcgaataccttctttcccctataccacgtttggcacactcgagcttcttaaagggactccggtgcccagatcatatcaaccacaacgaaattggctttgaatcccgcacgcagaatccctgtccatgattcagaaaaagacgcatatgcagtccccgcagtagctgccgacacagcggtcgcgagggaaacagcgcattcaggattgatggtatcttgcagggagggctggatagaggaccgccgggtggtagcaacgtagagattgggcagtgcctgatggttcgcagtgggggaatcggtgccaaaggccaaatgagcaccgccttcgacaaactcttggtaagcgaaagctcgcttgcaacgctgaatctcaagcatctctggccacccaccaaaggtcgctgggtcaaggtggacaggctggactgaggccactatcccgagttgaccaagtcttttagcgtcttcgggggttgttatctccaaatgttcaatgggatgacgacaggctggcaagtcctgaatttggcataaacagtcaatagcctgctgcactgttcgatcccaaactgcgtagatgacgcactgcaggccagcattagtagcacggcaaatagctaatgaaagggcatcggctggccagataggatcgacgatattggacaatccaccatatgcttggtgtaatcccgctgtacatccatccactgtgccgtcacagagtagtttgattccattgatacaaaattccgaggatatttttctgttgaaggtttgttgaatctcaatggcgcgatcaatgtgactgcagatatcggcatcgcattttgagtaaggtaccaaccagtgtaccgcaacatgcatcgggagctcaccacgctgatttctgtacatattcaacgccacccatccactctcccccatagccatatcgacgagtccagtatacccagcgcgttgatgcgcacggattgcagcatcaatcgcagccaccttgttcttcatagacatgacccggtccaaaaatggccaaacaacgtcgaattgcgccgcctcttcgagtaggccggacggggtcccattctgatagcgatgaatttttccgcctggaggatcgggtttcgactcagcctctagctctttgagagctgcattattgcaccacgttgagtgaaggtctaatgcctcaatgtagataggtcgcggatctaggtcgtccagtacagttgcggaagcgttaccatccgtaactgactggacccaacctcggcacaaaatgcgtggatctgatgggtgagttgctgcgtaggtggtgatggaactttggatatctgcgacgttcttgcaaggcaaaagatcgagtttctgcagcgatataccggagttgagaatatgtacatggccatcaataaaccctgggaggactattcgatttctcaagtccaccgttgatgctgtggcttgaacccgaacaatcgcttcgtcactgtcccaaccgacgtgcgcgagatggtcatcctcaactaccagtgtggagacaaagcgaccccatgaaccgggacatagaatacgcccattattaaaaatcgttgtaacgataatgatacggttaagggaagagggatggtgcagcaaaggtagcaagggtagttgactccttgagttgtcaaagttgaagttgagattgggttggtgtagctgacgtggacaaataagacacagacatgggatgccattggctgtatgagattgggcaacatttaaatggtgtaacattaagaggacatggaaagaaaaagcaatgaaatctttatttcagattgtcttattctatagacctctccttctctcggtgcgtattttctgtttcggatagctttgttgatcatatatagaaacccacacatctataactccatgtctttgaagataataacttatgttttgatgaatggaaattatactcggggtttcagtgtggattctcatttctgacaatagcgtggacgttttagatcaagatcgtaaaatcaactttctttgtgctagcaggaattcctaatagatatagttcataattaattatctacacaaggcataattcccgcgagaccactcttatatcagctagcttctggaattgtagtatccccgttcaaagtcgttgacccgatcgaggacaaatacaggtccctatggctgtggccatttttggattcttgacctcgacagatgtttaacggctcagtgtttaggagaattttctggttgtgttcatccactgaagaaaaatgttgctcctcattccaaagaatggcggaaatatgtcaattatttccgaccagggtatgctaaggttcaaagtctttgcaaaggatgtcaagatggaaacggtagttgggaaggtccatattgaagttcctatatatgctcatctctcgcgtagggagcatctactactgggctaggagtcttgcggcagctacagccggaattaaacttcttctattgattattttataccccaggatctcaacttggtgtatttgtcagtttatgcttcgaatcgtggcgccatccaccaccaatgacagcatgactcggttatctgagatatatggctgatgccggaggttatcttaagcctctcaacaattgctgagggaatccgatccaactacatccatagctttatatgtggtatttgttaagccgagacttcccggtcccgaaatctgcggtacataagaaatatcccacgcagttgagattctacgtgtgtaaggagtccggagtaatatgtatcatacgattcatacctatcaactatcatcaattgatcccttgcgaagggtggattcccgagatcggcgttcggcattgtctccgacaagtggcggggacattcagcactcgaaatacgtcaatttgtcagccgatggattattcccagtgaatacataaggggggaatctccacgtctctgaatctccgaatctccgaatagatcaattgttaatttctagagaataaataatgggatctcctttgtttcgttccccgccaatccaccgggccgagggtctgccctattttacccccgccaacgatgccggagcagctataaacgcacaggaccccagcatcccgacactgttccgccctttacgaattcgagatgtcatactcaagaaccgcgtgatcgtggcgcctatgtgcacgtactctgccgaatcggacccaacttctccggctgtaggcgcgctcacagattttcacatcgcgcaccttggtcatttggcgacaaagggggtcggtctgattataatcgaagcaacatcagttcagcccaatggtcgtatatcgcccaatgattccggcctttggcaggacgggacagactcagaacagttcaaaggactccagcgcgtggtgaagttcgctcatagccaaggcgcgaagatcggcgttcagcttgctcatgccggccggaaggctagcacggtggcgccctggctcgcatcccaagcaaagcaacgcggcatcaaagccgatgaaagtgtcggcggctggccctcaaatgtggttggcccctctggtggggaagagcagatttgggcacctggcgatcaattctggccccctcgcgagcttgaaacggccgaggttgaagaaattgtccgggcgtttgcacgaagtgcagggctcgctgtgcaggcaggagtggatgtaattgagatccacggtgcacacggatacttgctccatcaattcctcagccccgttaccaatcgacgaaccgacaaatatggtggtagctttcagaaccgaactcggttcttatgcgaggtggctgcagcaatccgtgccgttgtgcccagtggaatgcccttgtttcttcgtatcagtgcgacagattggctcgagaatcaaactgtcgcagaaggaaccggaagctgggacatgccatcctcaattcaactcgccaagatgttaccagacctagggattgactttctggatgttagctcaggcggtaatcacagaagccaacggattgagcctcatacgaactatcagattgacctcgctggccaaattcgccaagaaattcacgccgccaaacataagacactggttggagctgttggctttattaccgagcccgagtccgctcgcgatattgttcagggtgcagaagaagagaggcaggcgaacgaggcaatgctgtctggcctaaagccccaggctgatgccgtgttaatggcccgtcaatttctgcgcgagcccgaatgggtgctggcggcggcaaagaaactggatgtgaaggtatctctcccgcggcaatttgcccgaggcttactgtaaagtggacacatataattcatagaccaatctttctaactgcatgattgtaaacctgcggtgtccctgttccgagtctcagtacagactgtagtaccgcacatccatagtccaagactgagaaagcgggaagattctcgacgatcatttccatattggaattcccctatcatctttcacgaagacttcttctcaattttctatgagagggccctcgtccgacccttatccagcccaggtgacttgttgtatacgaatctggggcgaatggtgtacttgttatcaaccacgactcccgtgcgtcccgccctgtccagttacaagccaatgattgatcaacgtgcaatgccaagcaccgggccaagactcgggagccggtgttacaatgcatttggagatgaattggtactagattggcattgtttatgaggggctgttggcttgccctagcagataaagcaggaatataaaatcgacgcttccaacttccaacttgctgatgctctctgtattcatcctacattcttgattgtaggcttgattactcaacgcattccaaaaaaaaaccacaatgggaatctctcgcactgcctgggttctggtcttcgccttccagcctttccttggcggagcgttgcctgccccctcaccacctgggatcccgtctacctctactgcaacgagtgagctggcaggattgaccgttgctgcacagggatcacaggatggatatagccgtgatgaatttccgcactggattactatcagcgggtgagtagatggagtcactgtgaacctgaagtgttggctgctcaaattgttggcgacagaaattgcgacacacgcgagacaatcctcaaacgggacggaaccaacgtggtccaaagctctagctgcagtgctaccagtggatcctggttctctccgtatgatggcgcaacctggacagctgcaagtgatgtcgacattgatcacctcgtcccgttgtcaaatgcatggaaggtgagctcggaccatctgacaacattgaccttgagatattaatgaatattcgcagtctggcgcgtccagctggaccaaagcagatcgtcaagcctttgccaatgacctcacgaatccccagctcctagcagtcactgacaacgtgaactccgcaaagggcgacaaaggcccggaatcgtggaagcctcccctaggtacgtggtaaaccatgtgtattgtctagtctatggtttctgacatagaacagcttcatattactgcacttacgccaaaatgtgggtgaaggtgaaatcggtttatgatcttaccgttacttcggacgagaaggctgctcttgttgaaatgctagcgacttgttaaaaagtttgaatacgttgtagtgagaatcaacatcgaatttgcattcataggatttgacacctaattttctaaacgcgccgcaatcgtacaattcatgtcctaatggaatcataatatagaagcaggtgatctaaagcagtatcgtagaaacgactgtgctccgcggactgaaaaggggagggcactgggaccagcggcacgaatcgaggggactggaaaatggccgagttaagtgaaagaagggtttatccggtgatccaaacttgaaccggcattcaaggaaaatattgggaatattagatcataatgcaatggttgttttattgaactaagaggaagtgcgttgttcattaaaatagtctgaagtgtcaggcaccgagatagatgacacgtggtagtcacgtggcaatagagcttggccggaacaacctgggaagttacgtgttatcgggtgactttgggggggaacgatattccgagatttcgttatcggagcactccggagaaagggaccggaacattgacggtccgaatccatcgacggggtaatgacatgtacaacagcctaggacggagtactccgccgtactccgtgcttcatacagaactatgtgcatacaacataattctactattttctactatctactattcataatctcattatttgaccaagcattgccttgacaaaatatattttccttgatctatgtggaatcatcatcggtgtcctgaaggctgacacacgaacgatcatttcttcacctttactaatcatctattcgcccggggctttgagaaagctgtgggtctgaggattttcaagtggagttattttcagccaagcattttccaatgatgcttcttgtccgcacgaaccataaaccaggttttgtggcaagccctcgggggttggatatgtgggatcgagggctccgatttctcggctcacgaatccaaagtgtttcgtgttcttgacccggcccccgagcctcactctttatgctcccattattattagcattatgaccttgccgggtgagaaaaaaactaccgatgagcttcaggatgcggagaaaaataccgatgcctgtcgtcaaagccgggcattgcttttgtcggaggaagaagcccttgaaaaagcacggagcagtcctaatgacgcgctaccgattcagataatatacgccgccagtgacccagataacccccggaactggccaaaatggcgcaaatggtatatcacctgtgtggtgagcatgctcaatgttttcacgtacgtacacttatcactccttcccagtcgaggcttatctcactcgtcccatacagcacatggtgcgcagggggcatttcctccggtgctgccggaatacaaaaagagtttggggtatcggctgaggtcactactttatgtttatctctatatattcttggatacgcaatcggccccgtccttctcgccccactctccgaatactttggtcggcagccggtttacgctgtatcatggtttggtttgttcattttccagcttccgctggctatggccccaaacatcggtactgttctggcatgtcgattcattgcaggctgtgccggaggtgcgcccctgacaaacattggaggtagtatcagcgacctctgggaacggaacgagagcggagggcccatggccgtctacgggctgagtagtacgtttgggcctcctatggcgttggtgatcaccggttatattggacttaacctcggctggcggtggatattttgggttttgatggccatgacgggcggcatttgggtcttgttggtaaccacaattcccgagacacgacacaccacagtgcttaagaggaagaccaaacgcgcacgcaagcagatgaagaaagagaatcttcaatccgcagaatctaccaccgatatgcatgcgaatagcagaaaagggctttacgaactattcgctattaccctcactcgtccattccgatttcttttttcggagcccatcacgctgttttcggcaatctataatggctttctgtatggattggtatatcttttcaacgaggcgatccctctggttttcggcgctccgaaagggcacccattcaataccggccaacagggacttgccttcttgggactggcgattggaccgttgattgcattctgtttctacccactacaagaacgatactatctgcgccgggttgccgagaacggcggcaacggcgttccagaggcgcggatgtggatggcccgtgggggtgcgattctcattcccatcagtctattttggtttgggtggacaagctatcggtcggtccattgggttgtcccaatcattgcctcgtcattatttggcgccggaatttatgttgtgattctgagcattctgaactacgttgtggatagttaccagacgtactcagcttcggctcttgctggtgtcattctggcgcgcaattttgtcggcgccggattcccattgttcgccgctcagatgtatgagaaattggactatgaatgggcttcctctctcttgggattcatctccattcttcttgtgccaattccattccttttcttctacaggggaagagccattcgcctacgaagcccgtgggcgcgggagtacttcgaccagaacgaagacagcccgcattaacaactttcggggatagcctcaacttcgatttgaaaagcgtgaaaagaaaacttccttgttaggaggcatatcaaatgatgtattctcaagttcaatagcttgctagacccttaatctcctagaagttttcagttgtactgaatatgcgccgatgctcaatgcgactacaatcctcatctaggagatttatagtcgctaacacatcaagatgtaattctgccgtttctcatattgaaaccgggtgtaaaattggtttggtcccgactgatctatgcgcccttagtgatcaatgatcatctgctcatcgtccccgtgaggatgcaattacccctatctttttagtaacgttattgaagagctgcttttccctcacaactgcaaatccggatagattatagtcgtcaatttcagacgaaacacgtagtgaagtatcccgccgtagtctattagtccccggaaaacttgctacacttgtttgtagagatattaagggccgtaaccgagtcattgtaaactttacagatcaggcagtgatacttccgggtcattatgacttgggaccacaaagttgacatctggagtgtgttggcatgttggtaggataacaacctatgcagtcacttgcggtcaccgtgaaaactgacattagctcagatctaggatctttttgagcatcgccacatttgaagggctcgaaatcccgctgaacttgatgatgggtatcctcttgccgaaatgcaggcagtcctgggaagccctcctctcaaactcctcggtcggagcgaaaggagccaccagttttgggatgaaaaaggtttgtgcggctatcccctaagaatgattcaaatcatatttgccaaatttaataattgtatcaggtaattggaaagtgcagatccattgtcagatttcaacctcgaggcgctagaagagagactcaaagatgatgcaaaagaggaatttttacgttttcttcggcgaatgctatgttggctcccagaagaaagagcgtccgctaagctgctttttgatctttggttaatgcgtggcctctgtaaatgagaccatggataggtcacttctgatgatatgcattcatttatccatttactaatggtacagagggattcagtaattcattattgtcaacataaggaaaaagccaactcattctcggcaataatggcaatacttggccaatcgggggctctacagccttaggaatcagttcctcatagtcgtgactgtcacaatccactacagatcgctatcatctacttcaagtttgtttgtttgcttacttgctcgtttgcttgcttacttattgtttgcattgtttaccagtttctatgatatagattgtttgctagatagctaagcgagatattagaggtgtacaatgtttgcaaagggacagctatatcaacaggctgcctcccacctcctaccttgcaacttgcttcttttttctccccccatcttagttattatatattgaacgcaatcttctatcttcgaaaaacctggcacgtcatattggtaatctagcaaataaaattcattctaaccccctttagaaaaatcctcttagaacctataactatgctaactaaggctgatagcgacgaatggcatcaagcgcgagtgcagtagaaatacctcggttcccagccacagtctcttagaataatactgatacagagttcccatctcccatccaccatccaccatccaccatccatcatctggctcttgtatcgatagtaagactttcagccctgaaatatgacgaaccccaacttggtggcaaacaatcagtcgcatggcgagacttaccgcatccactggcccgaatctgggatcccgctctctcgatggattttttttcggagtggagtggccatttttcctcgattgttgttttgatgccaaaagtgcaagtaagcatattgcatacctgggcacatcactacagtggtccggaggggctagtctacggtattgtagttcaggggtaagaatttatttctttgtaccagaggggataataactgcaccctcatatcacaacaagaagaattgcagtaaaaaatgctgaagtactcgggtctctcggcaagtctaagtgttacgtgccaattcgattcagaagaaaagagtgcaattcaaaccagaatctaagtacaaagaaggaaaggaaaagagaaactatctgtgtgcgtgttcttcccctttgacgtccttccgtttgcattcgatgcaaaactcgcaattgtctcgcttaatctcgtttgtcattctaggaaggtgcgaggccgagggcgtggtcgttcctgcctgtttggtaggtacgatccttcctagatcgtcatactaagcccctaagcagtggatgagctaactagttagttaactaggttagttaatgatatgtaatgggtgactaagccagttacagggttggcagttctttacactatacggagtagtatcggttgaattctccaatggtgactagatcgactaagaccataagaacgtggatcctgcgaaggacttggcggcatgcgagtgtcaaatcaatcatagtttcggatcagattagttggccaagccaacggaaatcttctccttccacgcgaatcttggccgaaagagatttttttatccttctgtttcctgatcatccccctttctccgccttttctcttgaattaagaaaattgtaatcaagttgcttcgtattgtacgaaggagtattgttatgttcactcaaactgccaaggaccaggaacaattcaccaacgatcccctggacgggcagacgccaagatgccaagactaaagaggtatggctcggaatcttacgtgtgaccgaacactgattcctattgactataattggtacggagtattatggacgaatcttacaagctgagagtgtaaagttcttcagtcttctctttatcagattccatctaatctgataaagctgatggcatccaataagtaagtctggaatactattgccactgggacatatggcagaactttcgaacgaattaggaaaaagcagaagaccctgccagacttctatagtggtgtcttcagtctattccccaccgcaatgaggctatgcagaaaaattcccccacatgtctttgattatcaacggatctgataggggaaactagctttgtcttacccgaacagtgatttagatctgtcgatctgtactatgcaggactttcaggcttttcttggcctctcttggctcattttgcgcgatttccatgagaatatgagcgcagtagataagttcctcccatcttggtataagaagattcgtatccttttctgagcataaccctcttcagtcaagaaccaagggttcaatataccactatgagccccttcttcctggtagtcagcctgtggcaagccacgttggtaacagcaagcgctctatgtgcgactggctgtcagactgcggtttccaacaacgaattttcaggcatcagcatccttgaggactattattcagctttgtgccaaaactccctccaagtgaaggcaacattcatttgtatgcgagactactgcccagaagacgaaattgcaaaaggatggaatgatctcaatcaggtgtgtgaacaagatggaggagttgagcttcttccatggtctatcattgacgatgtgacggacgcggagacaaaatcttggcctatcttgacctatgaggatatccaacttggctctacctttaacacctcagtttctgtggatcagagcctcttccaacttgcgtatcagacaaatgtgagttatactatatcactggatctgattgatgattaactggtgtctagttcgactgggatgatcaaactacgcggcgaacgaactacgggtaactcatagatccacccactcccttggttttcacaattacttacgcacataccttcctcatagatatgctacaattggattctggggattgatagtactttttggtgcccttgacaatcttttccgatatttaaacaatttgtctgtgctgcgctcgagaacaatgacaagattcgaaagctccgttcgccgactggtagtcgtgccaccgatcttgaagaaaagtccattcacgcgcttttgcggtattccttctacatcaagactacaagccatgactatctcggccttcttcgtgatcaacataatcctcatgtgtgtggaataccgtgctttcgaaaataatctttagtgagaccagattttatcctcctcctgattggccaaccggataatgagttgactgacctcccttcccatagcttcacccgaaagtcctcacagctttggcgttatatagcagatagggcggcggtcatggcgatcagcaatttaccagtcatgtggctcttttccacaagaaacaattgtcttttgtgggcaacatcctgggaatttgggacctttaatacctttcaccgttggattggaagagcttgtgctatagaggtatttgtccatgggatgggggtttgtatctatcaatatcaaggtgtgtctattcgcattcttttcgctggaggcctttgagaaaatattcccgagttggattgaagttgacaaagtttgagaatgaagaggttggaaaggagtttttcttgcctctctggaaagagcgtgacttctatatgggagttgttgtaagtcaaaaattccgtgtattctctgccttagctaatacgctctcacaggcagctctctcgattatcgtgacgtgccttttagcaagctcgggaatccgaagggcagcctatgaattatttttgatagttcaccaggcttttgctgttcttattcttgctgcgttgtggtagtgagttcctttcagcatcaacttttaggaacatgcttgactaacggaatttccagccatctaactgtcgatggcccagatcatgtcccatacctttggccttgtattgctgtttggtcatttgatagactgggaagggtgtttcgtctattgatctggaacaagccaacttcacactcctctggagaatacaacagtgacgcagatctcattcaggtaaaggcccgcatacgacgagttgttgctcctcaacctggaagttacttctatgtgtatgggtggcggtctctttatttttgggaaagtcacccatttacacttagcgggtggactacggtcaatacggaagaagaatcttacacagaactcgtatttcttattggagtccacggaggcttcacatccaggcttcgcaaacagctgcttcgtcaagatgagtccgggatcgactcttcatcctctgtgagaaaggttcacctggctgttgaaggtccttatggtccacatttcgatccgtggaattctgaaatggccgtttttgtcattggtggcgcgggtatcacgatcgcaacgtctttcatccaacagctggtagatttcgtgcggcttggcaagcacgtggatcaaaagatcaagtgcttgaagataatatgggccataaagaacatcgagctttatcggttcgtctatgagcgctatatatcaacgtgggaagtggtcttcgcatcaacatatattgaaatctcactggacgtgtacctgacaagcccttccaaggcggatcaacaagttgaattgccgatgccagaatctcaaaccggacacagtgcgacaaaaaagaaaatacgagcagttgtatcgccggtgtgttcaatgaactttcatgcctcggaggaaaaagtggcttctgaagaggtgcataaccagtcagcgtttgggcctctaaaaacaaatctcattcacggaaggccaatcatccgcgatgtgattagaagccaagttgaaagcttcaattcttacccggagcaacagattgcactgatcggctgtggaccggatacaatggcacacgacatacgcctttcctttgcagaatcctcaaaagagactgacgtcaacattatctttcacctggcccctttcggctggtgattgatgttcttgtttatccttgaacctggaataaatattcaatgattcactgtactcatgtatttatgtcacattttcaccgcatcgatatgaagttgaaatgctatcctcgtgattatcaaggaatgtgtcttctccgagatactgtagtacttagggccatcttcattcttgtatagcactattagtgggaaggggcttagtggaatggaatttctggaatttttgcaaagggagctatatcaacaggctgccttctagtttgcaacttgcttcttcatcctctccctatcttagtagttattttatatttgaaagaactgtcacgtcacattaataatgtagcaaataaaattgatactaaccccttcagataaattctcttagaacctatgtgctaaccagggctgacagcgacgaatggcatcaagcgcgagtgcagtagaagtacctcggtttcctagccatagcctcttagaataatactgatatagagttcctatctcccatccaccatctggttcttgcatcgatagtaggaatttaagccctgaaacatgacgaactccaacttggtggcaaacaatcagtcgcatggcgagacttgccgcatccactggtacactaagacgttcctccagccgcttaataagcaatcctcgcattcgaatatagacacaaggccgatgattcttaaggcgtaacatcatgcgcgataggaagaagaagaatgcctcagggagtggatagaaggcggatccgtggatgtaagtccgtgtttggaggacttggtaaacccaatcaaaggtctcagagagctcattaccccagccatactggtagaaaatattcaaaatattgcaacacacgattgggtccacacgcttcttgaagtcagtgaagaaggtctggcggcccgcgggtggaagatgtcagtttttcaaagagctcacagttttctccactggtgaagctcatacctgcatcagaccatcagatgttcgatactgaagcatcttgtccatcacaagattggcaacgtgagtgggccgattcaaaattgtaataccgagtgatgtcgtgtccatatcatcggggaagtcagcttgggtaagaacaggtgtaactactctggtcagtctgtgttaacagatatgcagacgggcaatgatcactttcataccgataaaaaggttccatgtggtccgatggcttccaatatcaatcaagcttctgttctggatcagctaattgaataaattattttccgggctttgacaaacctgtcgccagtgagctcaagtatgagcagttgcgtgaagttttccttcactggtacgccggtatgggtgaaggaatggtgtttttgagcattctcatggagatatcgcgtacctcgcccaatagggtcaatgtcgacaaaattcaaaatgctgcggtacagcgaataatctgatggcataacgccctgcatccccatagacattgcagcaagtaagttactcgtgtcatcatctaccaagatgacctgctccgagctcaatcctatctgatttaggacatgttgataaaatcgcaattcaggcttctgcatgccgatatcacttgacacaaaaacacgttcgaacaaagaccaatcaaacccaagaaactttaccaaggcgtagtcctctttggaaaaatttgtaaccgcatatagctcgaagagacctttagacttggccttcattgaagccaatgcctccacgactttggggttcacacatagtgattttcgtacagcaaggatagctttctttatctcctcctgaggatggcgaaagtcggacgccagtcgcgcaaagtattgctcttcggtgatgcgaccacattggtattccactgttgctccacagtatagaatagacttgagagtatttgtgggaagttctatgttctgcattgaggaatgcaagacaatatttttcaactcaatcagaacccctttgtagggaatgcgcttgatgattttacccatgatgatatttccgggttgaggtggcatatggagaccttattgtcgagcactactaaatagtcgagtcgtgtaagcggtcaagtagccttgttgctacgagtcgctgagcgtcagcccgaccttgatggactgccaccacgtctgttgagaaaataccgtcagttgagccgaggccagtgtatgtatcgtaccaatgggaatttcatccctttttataagcggaaatttgtgctaattatattgaattcaatagtagcagcagagagtcattctcgataactctgggtcgtgacttgatccgtattgtggacggcaggttctggcgcactacagacagcgaaccaatattgcaggatctcaacctccaaatcaagtgcgagacactaacagcagtggttggaccttctggatgcggtaagacgactctctttgaggccctattgagagagcttccatgtccacttgactctatccaagttaactccgcatttgacctacgaaccggtgtcgcatactgttcacaacaaccgtggctcagaaacgacactgttcggaataacatcatcgccggcatgccgtacaatgaagcctggtacaacaccgtaattcatgcttgtgcattggaggaaatcatccagaagctgagcgaaggaatggtcggcagtggaggcaggagcctgagtggagggcagaagcagagaattgttagcatacctcaatgctgcattgagagtcacagctaacattccgctagtcgttggcgcgcgccatatactcgcgtcgcccacttcttctgcttgatgactccctttcgggaattgataatctctccatacagcatattttcgatcgtttgctgggtgttgatggcttgataaagcagacgggtacaacagccatccttgcaacacaaaatggtaagaacttagaataaccgacgcaaatatgcgagaataacaagaatacattagtggaaaactcaagtctctttgaccagatcatcactctcggtggtgataccactgtgctcgaacgaaaatcccatgccgacgctatgaagaattcagagaagccaatcggtccagggaagcttcctattgaggcgcccatttccatatcccagaatccattcgcgttcgccctggaagccaggtttgagaccgcggcttccgaccctcgcgacccccggaaaggtgaactgggggcatacaaataccactttgcctccttgggcttcaggaaattgggcctcgccgtctttctggtcgtatcttatgtattcttctcctcgttcccccgtgagtcatcacctgtcgatattcgatgattatcactcatctcattcgcttgcagaaatttggcttgaatggtggactgcttctaatgtagaccaccctaataacaggttgggctattggattggggtatacgctgtttttggatttctggccgtcttctccctgattactgcttcatggtttgtctcaatcatcacaaactcgctccttagtctgacattaaacaggctcatgctttgcaacatggtgaagaactcagcgaagtctctgcatttggaactggtccagactgttgagcggtgggtatccttttcggaagctgttagtgaacagatttgctaacatcttcacagggccgtcgcatctgtgttcacttctacagatccaggaatcacagtgaaccggttcgtctttcaaccgataagctgaatatcaacagctttttctgaccatttgaacagatttagtcaggatatggctttaatcgatatggaattgcctatggccttcgccaacactattatctgtcagtttgtgtcttccaaatacctgcccacgcgacttactaatatttctagccttcacaacctgcgtggcacaactcgttatcattgctgtgtcttcacgtcatcttggtgccgccatccctttcatcctcggcttttgtattctcactcaacggctatctattcgaaagtcacgacaattacggttctttgatatcgaagccaagagtctgttgtacacggagttcattgaactgctgaacggcccctatgtggttcgcgccttcgatatgcagaaggaatttgagcaacggctttccatagcactcgatgcatcacagaagccgttttatctcctcctctgtgcgcagcaatggctgggtttggtactaaatttggtgaatctcggtctagcgttgatcttagttggtgtcacaacagccacttgtggcctctcgggtggctttttaggtgttgcgctgatcaatctgaaaagctttggaccaagcttatccgaattggttgatgtgtggtgtatattgcagaatagtctcgccgcagttgagcgtgtgaaacctttctccgaggaaaccccgaaagagtccacagactagcctgttagcccgtcgctaggctggccccagctaggggccattcaaatgcagtaagtatgtctgggatacgagtcagtggataatattggctcgaaatacttagtcgcagctaatatctaacttgaaaacagctctggttcactcgccgtcaaatccctgtcacttgctatcccggcaggaaataagattgtcatatgtggccgaagtggcaggtaagcagcttccgcgggaatgtcaaaacaatttgaactaacatcagggtttcacaaagcggaaaatcaacgttgtgcatggctctcttccgcatgcttgatccgatatccggcaccatctcgatcgatagacaagatataactcgagtcccctacaaacttcttcgctcggcactttctattgtccctcaggatgcagtgatcctaggaggatcaatctgactcaatgttgaccttgaaaatcagcattccgacagagaagtcatcgaagcattagaacaagccgaactatgggagtccgttaaagagcgattcaggagagaagacgatacaagcgccgaatctctttccgggggccagaagaagcaactctgccttgcgcgcgcgttagtcaaaaacagtaaaatcttagttttagataaggcaacagccaggttcgccttgaacagtcagttcgctccaattttgaattcaactaacctgccacggtagtgccgactctgcgaccgatcaaagggtccatgggcttgttaatcgaggtctacctggaacgacggttgtttctgttatacatcggttgaagcatgttggtttgtatgatctcgtcgctgtctttgatgacggtgagctggtggagatgggtaacctggtagaactgctcgaggactcagcttcgaggctagtggagctgtttgtacgtgattgactcgatatatagccttgcgatagtatcataaatagtgcagtgggggtttccagagcaggatgactaagcggctatatgacataaaagcactcccgaggcctagatagtaacgtagatacctttctacctctcttctcagtagtcaccctatggtattctcctctctagtaccctactactcctagtaacgactctactcttatacctatttcgcaggtagggctgtcggtaccccttaggggtcccctctttatatagtgaccgatgtagggagtagcgttaactagtatattagggagggggtaactactaaatctaccttaccagccttttaccactccttttaccagttacctggctgaatgaacgttatccttaaagcgatatcctaataagtttctactaccttctataatcagccgccttagtaataaccataccctacgtttcagtcttcagtaacgtggcccaaccttgggctgagaagtcaggcccgaagcccgacccagcgacgggtcgnnnnnnnnnnnnnnnnnnnnnnnnnnnnnnnnnnnnnnnnnnnnnnnnnnnnnnnnnnnnnnnnnnnnnnnnnnnnnnnnnnnnnnnnnnnnnnnnnnnnnnnnnnnnnnnnnnnnnnnnnnnnnnnnnnnnnnnnnnnnnnnnnnnnnnnnnnnnnnnnnnnnnnnnnnnnnnnnnnnnnnnnnnnnnnnnnnnnnnnnnnnnnnnnnnnnnnnnnnnnnnnnnnnnnnnnnnnnnnnnnnnnnnncccccggggggggggggggggtcgggtcaaaacgggctttgatctacttggacctccctaaaaggtcgaataagaattaagcgagataaatgtaagaggataagaagggaagaacatatacttagatagtttctctttttccttttcttctttatacttagaatttggttggaattgtactcttttcttctgaatcgaattggcttgtaacatgaaatgctttatgagaatgccaggaaaccacctaaaaaagtcgggatcattgaatttgtatggtgccaaatgcttcatgctcatgggtaaggctggcagattactaagctctctgtaatggtaattcaggtgtccttacttttctgccaggcaaaattcagccattaaggccctaatatggtgaaaacgaccctgcgcgctatgccccttcgtacccgttgtcatagctgggatagaaacaacactcgattctcggaagaggatggcttgttccttctgtggacaacgggaagcgagatatggagaattgttttaagtacaatgaattcaatcatccattttttcgccagccaagcagtttcctgcgacaggccacggttctcagtatcacaaggcgaggttttttagccagccagtctccaggacctcggatttcattcccacctgctctcagtttgaatccacttcgatgcccaatgtcaacaaaattggattcgacgaagccgcccatttttgactatcttcccaaaatctggatgcctcttccaagctcttggcaaaaaggcttcaacaatatggtcgggtccttccaggtccagtaatccacatatctcagctcgacatgttcgaaaatcgtcacctgaataaagttagcttataccattctactgcgcatctagaacataatggtccatagaatttagatcagtggcataattaccattctatgcatagtggcatcgatgacaagcataatgttggcattccactgggcttcgattggcaccaacaagaactatgcctgcacaaaattccctgaggccataattcctgccgtggcagtcacagcattcccagcccatgcggattagatcctggacaaagcaatacgcttcaccacatggagaatccactgcaacatctgtgacagttctctcctgcccacacattgtctgtctccctgttctttggttgactctagcataacgacaatatgttatacctcgttggagaattcgatgtccacaacgatagactcgatactggcgaccacacattgtttttaataaaagccaaagaaaaatacgtgcagaatgcttttgtcgaccgaaacgatgtgaattggataaagaatattttgaatatgtcttcgttgagtattttaatcaagaagaggatcttggaagcttccttattgcttatatgtccaaatgcctatagtattgtcctatttttggcttgataatgcgacactgaggggctacatggcggttgccgcttcgaacctttggcgcttaggtctgaaactatcttagtcaattccactaattacatcatgtcaggttgttcgttatagaatatggtagcgttttacatcatgcgaatcatgacactctatgttcgaagtaattataggtttttagtgacgttacattaaccgccaactttgtagtctaataaatgaaaaagcactaagtaccgggcctcacttttcagaagctaggagaaagcagagggaggtcctcgatttcttgtatacagtaaaatatacataaaagagagaaaaatcatattcgacgaacgaggatactaaaactagatataattatatctcgagatctgactatactcggtctagaaaatgcgctcacctttaggtcatctagcttattgccgcccactactctccctcccctccaactttgccctgtgacagcgcttagtcgaaaatactttcacccgttaggtaatccaacttattgacccctcttctcctccatatgtggatgaaaatctctcacatccatgtctagatagtgagtagatgtcacattgcaggactcctagagtactgcatatttcttagtaaagagcttaatcaagactaaggaaaaagggaaacaagggaaaaaagaagtcgaaaagtcagggaaactggaattaggcagaggtagacaacgtacacagaatcaagatgcaaacatagtgaatgcatacaggaccaagcattgcaaccaatcacagattaatgtataaagagagtaaaggaaattgctgccttagcctatcagagggtgtaacagcggacagtagaaagtataagcccagaacgatagtcatctagtattcattcaaaaaggtaccgcttaatattttcaagtccctgcagatctccctcggtcgagttagacttctccttctcaacccaaccttcagtatagcctcctccaaaatcaatcaggtatgcatcctcattgacatcaatgagcacattggctgccttcgcatctccccaaatgatattatgtgaatgaaagtgttcaagtgtctgcgaaatttgatcaacccatttttgtcggagctcggaaaatttgggatcatgtccatcaatgcaattgagtgtagctctatcacaattaatgtatgataaagccaatcccaatatatacccatcatcatcttggaccagcccttccagttgtgatgtgagaattgggggatcgaatttagccatgcgaatctttgaataagtgagaatctctcttgcggtaatacccatgtcacccccatagactatcttgaagaagctaggccgtggttgcccatgaataaataccttatgaggtattcctggtagtgcagctgaatctgtactaattggaacctggacttcccttgggtggtagacagaaaaagctgagtagtcgacagaagatggtaaagatgccccgatgagatgatttctcatgttcttggtgttgctgagataaacgggaactaatttgtctccaactacctgcacagtgtagtgcaattcttctgcaaacagacaatcctcgagagtgtacttttggttcgggtccaggggagcaatttcgtgaaagattggcagaaatggttgcaagatccaatcatgcatttcatcaagggggtcttcaaattccccctccacatctatctcagactcatcaggaatccattctggttcttgacgttgaacgtgtcgaagatattcggccaggagggcaggcgagctttcgaagctggaagtaaaaagatcgatcttgaagcgtttgttggagacataaacattcaactgcgtgtctgtgtttctggtgcttgatctaaatggaccgatatcatagatgggttgtttccgtgccatcgttggccatcgaggagttgcggcaagggaaaaaaaaataaaaaataaaaactaaaaagtaaaaagtaaaaagaaggtaggagtaagaaactgtcaggtcgggggaagtgaggtgtacacggcacaaagtcatgtgactgtcgaccaataggtaagtccggcaaataaataaccatcttcaccgccatcaccctctgcaatacttgattggaaaagctacaggaaaggggttgagcctggagaaccgacaggacggtatgattttcggcctcggacgccatgtgagtagaaaacgaataaattgaaacaatgcttttctactgcaagtttgtagtaacgtatttttgatcactttagcgcccttttcaactcgaggatgatgaatgccaatcattagtcgttgttgatatatacccaggtgaaacgcctacggcggaagcccattgtgcaatagtcgccacagtctagattggtgcttgaattagatttcgagacatctagatgctgatgcaagtggccgaaattatctgggcgcttagctaaaaattatacgacggcaactgacatcgcgttgtcccctatccctactttcagggacaaaatcccaacaagtgcatttcacggtggcaaaggaaaggaagaccattagaggtttcatgttgtgcgtctcgccgtgtaatgcaacctgcgccgcacggaagtttcacctgcatggcatatccacgccaatcaaggttagcaatgcaatataacgtcattctcggcgtcaatcttttttaggtgtctgcttttggactccaaccctcttgggtaatagaagctcgtattccatgcgcatgtcaatgttaactgacgacttaagcatatgtgatgaaagaaccaaatagcagccagtgagaattcaatatctgggaagaaggcttggtgcaattcaagtatacagcatgtttagtcatcttccttgaaccatccatcagcccagtgtgaggtctcaatcataggaggggcgtcattgcgttattcggtggtcccgaggctctgtgcacgaggcaaactgaactgccttagttgatctggctatcagggctgggccaaagatcctcgatagccgtacgccctttggaggtctaggaataattgtactgcaagtttctctgaaaaggtctaattggctgaaggccaagaccaaccacaatgcacagctccatgtatgcatggcatgtatgtatggaggggtaaagcactcgctcaatcagacgatactgttggctcatgccgaggttggccaatggggctgtgtgtggtgtctgcattgccctcttttgggcaaccgccctgccagaccatgattatgcatttgcgcacagtcttgggtttacttcctaatatagttatggccagttttgtgctatttccaaatttggtaactaatcaactttcgagaaacttcctattttgtattccagggcgaccaagaaacaaacgtcgttccttctcactgcctatctattaaattatataccgccccctattattactatacgttacgaaacccacttcttccttcttcaacccctcaaccatggttcaacagatagagcttgcctgcgatcaacgcctacattatcgtatccttcgagataaaggctatacgtatccctctattatatcccgtttaaattgcagtatacagtaaactcaatatacgtattataatcaaaccatactgtagaagaagaagataggccgacttccaaagcttacccctgagtgccttaacgaagtaatcctatagatttagcaatctctgaagtatcgctatctaaattatcataatatctatggtattttagatcttagtatatctagggaaacacttcgcctatcttgtaacggataaaggtccgtacaagagggaaacacatgcaaacctgcacaggctcgggaaggaacatctatgtcatcacacatctgtttcgatatcgatccgtgaggggtccgtgtgagacccctaggtatggaatatctaagggaatgctgtatgtaatggaggatcgggaaacagagacagtagtatacgcagtggtatattggaactaatagctgcttctctagggaagcagtatgcgaggacaatatataggtttgtgggtcacatgattcatagaggctgtgtaagcaacacgcgttgctcctatccagtccacagtccccccacgcaccatgacaggtaccatacttcaggcatcagccttcttagtactggggccctgacactacaccgtattaaaacaattgaatacagtgattaataataaattactggcagaataacagtggagaacgacgtttgtttcttggtcgtacactgtgcctgcatgcatgagacttcgtctcatagtccccaacgtggctttcccccgcaccagccaattgtctcttcggcacgggaatccacagtaagatagcgaccgttacaaactcagctttagatccatcttattctgctatttccaggaggctcgaggcataaactaccacctgtcagttagcattgtaaatatctgaatcacggaggagtagctacatatttggaataaccaaaaacatactaactcaacggggtcggagaatatcttcctgtctttcttcccaggaatattttaaggtactctcttggttccgccataaccgttgcatttggtgcatatagatgtactaaccattcccacatcattgcattcagtgcaaggcatgttttcttttccgacgtgttgattcaaaagcagaggggaaagtggcgatattcttgtacggggaagggcaaaacaggggatgttgtagttatcgtagaaaagtcaaggttaaagaaagaaagaggatatttatagccctttagttccgatacccaaactcgttgggtggcaaaccccgacagtggccagagctcccaatgaccctcccaactaggcttgtacacatttcggctctccacatacccaacgcgatgccgaatcctcgttttgttgcagtcgatccaagccagagaaagaagcgaagggtgaaaacaccgcaatgccagacttgtttcaattcattcggaacataacaagaattccgcgaccatatcgcagactatcaggccagtaaagtcgtgactctccaatttatccgctgacttgccagtttagttggaattccagctctttgttcttcgcccttgtcattttcaatgtgatccaccccaagcaagattcttgttggaccggacgccaactggccgaaaatcagcaaagaggaaaagtaggccaccaaacaagcgaaggaggcgaagcaattggccaaggcaggtggcttgacatctcctacggtctagtttgacaccttattttcatcctcaagcgttggagtggatttttttatgaatatgacgatctatataaaaaacatacaataaatcgtccgtactacactgggtactcgtactgatcacctcctacatggttaaaatatttaaataagctgctgctcaggtgtaagaagttacttcataaccattcgcgaatgctttcgaggctaactggtttccccggttgtttactcccaaccccaagaatctcgggagatttgcgggatcggcgatcgtgcacggacataaggtggcaccaccaaggtagacacaccgtcggagagaagttggaggccccccactggtcctcatatcacttcgccatgtctctcgagctgtaccacactgcacacaacgccggccagaccaccgtcgtactaatccatggcgccttggtatctggtctctactgggatcttgtgatcccccacctcacgtcttatcgcctcctggtcccagatcttccaggccatggcaattccgccagcgcgccattttcagtggatctcgcagcgcgtcagattgcccagctgatccgtatacacgcgaatggttcagcgcacattgttggccacagtctgggtgctcaggtcgctatccgcctggcctgtaccgaaccagatgtggtgaactctgtcttcatctctggttttagaatgttccctcaaacatcacttacgccgtatattccatacgcagtgtgggtgatgctgcgtgtggagaactgccttagccggcctcttatcagctgggcaatggatggtgccgatatcccacgtattgataccaatctcggtacacttgacctatgtcgccagattgtatcaccggagcatcctacacaatggccatcaccatggcctgcgcgcactctgattgttgcagcggggaaaggggggttagtgcctacaaaggatagcccgggtgatgctgtgaagttgatggcgatcgggagagagctgaacgaagagactatcgcgtatacacatttgaaaatgcgacatccgtggaatcgtcaggatccgcggctatttgcagagactgccgcggcgtggtttgaacataaggagcttcccgagggctttgtcaagctttagcgtcgggtagatgactgtttgaaaatagaagtttgtcccaggacttggatcccataaactccatattaaggaacatcaagataaaatagaactttggatgacaattgtcgtgcctggggggtggtaccacctaagcagcggctgatttggtcaagcgggggcgtctgacaccctttcatgaatgcctaaacatcaacttcaggagttaaaggtgttgaaagattgattcaagggctcgaataatcttcgctgagcgccttttgggagtcaatttcccacgatgcgtgcagatattggccattacgccagagatgtcgtcaattctatcccatccttccacggccagagtgctgttggtgatttgcaactattattcggtaatgatatcttaactatagcgctgtcgagctttggaatagtcggcttctcagtctggtcgatacggagaccgtggcaacgtccgatcaagaaggtcgcgctccaaggacgtgtagtctttgcgaaatcggtatttccgtctatataggaaatcatagagcctaagtacatataaaat
